United States Patent Application Publication US 2026/0058010 A1 - sequence listing, part 36

SEQ ID NO: 425 - DNA, 591360 bp, Homo sapiens
  source 1..591360: mol_type = genomic DNA
cacacctgtagtcacagctactcaggaggctgagatgggaggatcacttgagcccaggagttggaggctgcagtgagctgtgatggtgccactgcactccggcctgggtgacagagacagaacctgtctcaaaaagaggaaaaaaaaaaaaaaaagacgtgtgtctaatttcagaattaggcaatgcaactagttgaatattttattgcacattgtccatgatcttatatgtaaggcacatttcctagggaaagcaggcatggatttaatcatttatgttgtactgcacacttatttgcactatgtaaaaccatggctggagtgagagaaataacacttttaaaaaccaaccttatattctccatgtcattaccagtaattgataactgtttaatcatcaactccaaagatatttcttccttattggaagaattccagataaaactaaacagaactgtccaaacacatttcatcctaataaagttatttatataatcacttattaggtcataacttataactgagtaatgttctttagatcttaagtgcttgtctttatatagctttacaataaatttgtttctcttaaaattatctgtgcactagattaagttaaattaaaataaaatgtatttaactgtcttcaaaataaggtataggctattttcttcctgtagactgacagcacagatattggaaaatctcttctacttggttttctgattcagttcaaacttgtgcttgcaagtgaatcttacgtaaatgtcacctaaaaagagctcaagaagactcataaaaaatatttttttcgtaatttgattaactttcaagtcattcaccaaaagtcagaccatgctagaaagggaagaaaagttggacaacattcttgttttaccacaaagaccatgccagttagctggcttgattctcccactgatggggagaatgtttacattttaacaataacttcacaaataaacagatgtaagaagtgttttcagtgcataaagatcatatactttataaatccacctctcatctttcttctggacagaccacatctgacttcgaacgtacttactgcaatcaaaagtgttttgtaaaggaccctcctcaggaataaacaagctcactaaaccctccatacataacctggagaaacctccacaataatgaaaccccatctagcactgtttttcaaacatatggtgcatttccattaattttcagggatagcccctaaagtaacttttggctcaacaaccctggaagagaggacctttgctcatcttacacatcaagtgttcatgaacaactctgatgccactaagtttcgttcacaaacttgcacctcggtcgttcttttacaaaaaaaaaaaagaaaggttattttgcaaaaggcaatagatttaatcttggctactatttactcttaatgtttctttcatctcagccctccaatgagaagtttaaaaggaaacatccgagggagcaagtttagatctatctggaggagtttctgtggagccagccaccctcaccaggtgccttccattagagtttaatgctttgctgcggtttcctgaaagagccccacagagagtgggtctcgatgggtcctgaaccgcaccacaaccggccagtgaggtgaggggcgaaggtgaggggcggcggcggggcgaaggtgaggggcggcggcggggagaaggcttcgggaccccacacggtccgggggaccgcgaacgaggagcgggggtgcggggccgcctggcgtccccgtcgaggcggtcttcatgagaacgctcagagcaggggcgggcaggcgagggcttcgaacgcacacactggggccccggacccgcgtcgctgagctggggagcccggcggcgcgggccggggacggcacgggcactttggccccgtcattgacagttggcaccgggggtcctggtcggccgaggcggggcgtggcgccataccggggcgtggggcggcgcagagaggctgtacctggcaggtacccacgtacctatcatggtcactgggtaggtggcggctgcgggccaggaacaggcccatgcgcgcagcggcgccagccgcgcctcccaccagcggctctcctgggttaaatcctccaggcctccccgcccccgcgcccggccctaggaatgcgcacgcgcggagggcgcggcccagggcctgctgggagtcgtagttctaacgcgtagtttctcctcacgcctcctgcccccagccccccaccgccgccctttccggcttcaggcccagcaatcttacgtcaccggggggcggggctatgcgcccgccgtgttgaccagtcgcttagcaaccgggaggcttacctttggaagcttgttgcagctctagccaaggtcctgccctcttcccgccccgcccctagggtccagctcccttcacctaggagctgccaaacatctggatcaacctgggcactacgaggggttgaatttctaccattatcgcgccttttgatatttttttccagacctcctgctcacatccgtaaagcccactgattcttttactacactttttatgagaacaagacattttctaggaagatggtggcagaaaaagagaccctgagcttaaacaaatgcccagacaagatgccgaagaggaccaagctgctggcacaacagccgctcccggtgcaccagcctcactctctggtttctgagggtttcacagtcaaagccatgatgaaaaactcagtcgtaagtgatcttcctgaattaaatgcactcgctctgaatcaggggacacgagatttacagaggttggccagccttaggatggactctgagccatgtcctgggtggtctttgccaaaaaaggcagttacttggcaagtagcaaacggtgccccacagtgtgtggggggcaggctaggttgttagaatcttgggcaagtgatgtactctgcccatttataagcaccttcctgataacttatggtttctggaccgcccaaaattactcttaagctatttacacgaggaaaaaagatcccctttacttactaattcctaactagccccactcagcaaagggccttatagaaggtgagttcttagaaatcataaactcttgcaaaatttaacatgagctgatatacaaccgggaacataaactcatgaaataatctataatgagaaatttcttcacttcaacctaggaaattttagaatatcctagcatttgctctaacaacacttgtctcttacaaaatgatgtcatcttcttagagtactgaaagccaacttaatatgaacactgtttcctgacaggccttttaagatgatgtgctttaaacaatacaagctttagctcatatatctctgctactaatacaattcatatttcatctctattatttgtagtaataaaaataaaatattctaagtatcattagagaaaaaagattaaaaatatatacaaatattttagctgtctgcatgatagtatatattttttaaaccttcctatttgttaaatagctttacacttggtatgctaagacagattttgctactgagtaagcaactgtctgggaatgaggcattaaataataaatgcatctttcaaatttgtgtaatttacaccctgggaagatctgagttattacatggcaattcattatgttaaatgaatagtgttgttttccagtgtcacattatttcctttgcttataggttgcaaacctgataacttattcctaaacgacatacttaaaatacatgaatgaaacagattacctatagacctctaggccaggttcccatgtggctatgcaaaacgatatcctaattattgggaagtgtgtcaggtgatttacagtagttaaaattcttggaaatggactaaaattctgcttgttgtaactaattctttttcatggaatttcacataaattggttctcctaggagtcaagatgatgcatttatcagcaataccataaccattcaggttaatcatttagtttttcttctacacaatatttacaattttgatgttttttaatgttatactttaattttttttttactggttggggttcttttctgttttttcctaaacctgtattcataattcttgtatcatattaattctttaatataatcttacacctaaagagatagttctgcaaaatctgatgtttctgtattgccaaatgtaataagtatgcctacatgacttaaaaaaaacattgattatgaagcaggcttctttataaacaacttaattgagatccattatcttctctttttatgttctaaaggaaaatcttgtactagcaatacctctcttgccattggaaatcgtaattcttaaatgcaaacattatttatccattcatctatttattcagtcaacaactgtctctcttttttttttttttaatacccagtgtttgctaagcacagttctggggatttgggatcagcaaagcaaagtccctgcccttagtactccgaggaaaaccaaaataacaacattcaaatcttgataaaagaaggctggacaataccgtttatacaaaataacttcagtggtacaggaaataaaaattttcaatttcataaccaatatttacatttcaccatttttatctttagcagtatagacttctcagcattataaggtgaaaatgtcctcatctctttctgaaggtgtattttgattcaggacgtgtatgccaatttccagcttttcttaattgcaacctcatgctccaagagccaacaccctccaaaccacttttccagttagataagtcaacattccaatgctcttccacctaaaacatgaagaactgtatatatcataaggagttatacagagactcctgatatttctctgagtgcgatagtgatacaagtacataaacttgataataaatatgtttcatcaaatgggctgtgcaagcagaaatgcttatttaaacaatctggatatgagagtgcaagattattgaaaaaataatgataaatgtaaatggcaaaatttttaaaatctcaatgtcaaatatttttcttcaatagaaactagactttctttccatgaaatttttgttgcattctataagaaaacaagcatcacaaaagccctgcaatgaaataatattcaaattcacatttttatagtgcttgcctataaagagatatgagatacacaacttgaagatttcatagttcattttcctttaaaagtcttgtttggggtgtgatagagcccatgaccagaaactagtaacccagtattttgttgtctttatcttgtcagatactttctgtgctgaacaagcttatcacgaagcaagttagaaaatcgacccagggttatggtgacagagaagttgagttcagcctaagctttctattacagctttccttctcaaaagactatagatgctttatgctcaaagtttaggggaatggaataaataatttttttaatattaaaggttgagtattcctattccaaaagtctgaaacctgaagtggtccaaaatacaaaactttttgagtgttgacattacactcaaagaaaactcttttgagcattttggatttcagattttcagaactggcgtgaccatcagtatataatacagatatagtcagctctttgtacagattctgcctccatggattcaactaaccttggattgaaatgtttgggataaaaattttatctgtattgaacatgtacagacttttttttttgagtcattattccctaaacaatagagcatagcaactatttatggagcatttatattgttttagatattataagtaatatagacatgatttaaagtatataggtagaaatgtgtaggttacatacaaatactacgccatgttatatcagggacttgagcatctgaagattttggtatctgcaggaggtcctggaaacaattcctcatggagactgagggatgactgtattccaaatttgaacaaaaaacaaaaacaaatccaaaacacttctggtcccaagcatttcagataagggatagttcaacctatactttacatgtatagtgtgttttatatttaccaatcatgtgctcatttaacacgtagtggtaatcatcaatatttataaattatatattaaaatattaatttggcttctgtaacactgaccaaataacaatagcttaattaagatggaagttgtttctctcataatagaagttcaattttgtaggcaatcccaggaggttgggcagcattccccatgaggcaggtgcaggggcataggagcatgtttgttctttgcatcctgtaaaatgacacctgagacaaggggggctcgagaccaccagggtcaaatacctgccctcaagaaggaggaaagtggaagcagagagcttcccattatgtgcatgacccagacacagcaccccactttcattctcatccaactggccagaacctagtaataaatacacctacattttccctttttgcaaaagcctatgaaagcttgacccatgaagcaactcccaagcccacgtacctgtctcctcaggaaaaggatgaaggaagctatgtagttccaaaagggcatcatctccaacacctacttcaggtggaggagagaaaaatgggtatggagcaatctgcaagaatgaggcaggaagaaatgaagagcaaacagcttcactatgagggcatgtcccagaaacagcaatcctcactcctgctcaaatccattgccaaaacctagtcttatggccacagctagttgcaagagaggctgggacatgtagtctttaactggtagctctgtgtccggctcaaactcacaatgttttattactgtagccaaggaatattgggggataattagaagtgtctagctccagtgctaaatgtgctacattattagtgaagaaaaggagagagacaagtaaaataattacaatacaaataaacagatgtctctggcagagaagtactaatgatgaagggaccaagtggcgatgaactaatgggtgccctcatcaccttttgtctaggcttgtacaatatcatccacctatcaattggttgactccctcaatcaattatcagtacaattacactaatctttctggtacaatgttctgctcctatcactattcagagcttttggagcttcccaattcttatagaaaaaaagtcaagatacttccccagggccagcaaggtcttgtgtgatctaatcccattctgtgttctaaaatttcatctcccactgttctcatttgcttcagtcaatctgaaccaaggaaataaactcatattctttatttttgtgtttctgtttatgttgttccctttgctcgaacacccttctccctacatatctgcatatacaaattcattctatcatcaggtaacacatatctattgatcacagactatgtgcaaagcactgttttaaatgctaggaatttagcagtcagcaaaagacagaacacatgctgtcaagaagcttatatttttgtggccagcaaaatgccaactgctttaagaagacttctttaattctcccttcctgtcacccacatagaaagttatcctttattcattgtgttctactttgtattatggtcatttctgctcatgttttatctccttatgtaaattctccgtgagggcagtatccacatctaagtcactttttaatcttaaccagaacctaacagtgtattcaataaatatttgatgaatgaaggaaagcaattctaccctttcttcttatctcatattctcctactttcttattataattgttatttgtctctattttgaatttttttaagccatcctctctaattgtggagcccagaagctccctttaaaacttgagaaggccgaatcatggcattcgtcacctcaacccctcaggtggctccctgcctcactcagagtaaaagctaagcttcctctattgggaaggccctgtgtgatctgcccacccttgctgctttatgcaactctgctggccctgcctccggaactcagttagtgccacgcctttgcccttcctgtttcctctgcctgaaatgcattttaccctgtgtgtcctcatctcttgatgcttcaaatttctgtttaaaaattagctatttagtgagcctcttcctgaccactctattttaaacttcagacccttaacaatcccttccatccctgctccagcactcccatctcccttccctgttttatatttttccctctaatattaatttagttgagcctgtgtttttcttctaccagagagtaagccccagaagggcaggaatttgtttatttcacccattgctgcatcctcacctcaagaaaaatttatggcacatagtagctgccatttatcttattttgatcagttgaattaatgaaagactatattttatactataattagacaatcatcttcaaatcagtggctccaaagaaaatgccaatgatgttatatagatattaaatctagaaatgagaataatttgcagctgttttatgcagtatcataaaagttacacatgttcattgaaaaaagttaaagtggtttggcttagaaaagctttttcctgtctaagatgatgagaaaaaattcagtctttttttcctggattctgttttacttttaattttttattttgaaagtttgcttcaccttaagtcattttgattttggaaggtataaattttgacttattttccctaaatggccagagaattgttacattaccctttatatacttaaattaaattatatcaaacatcttcctatcaaatttaggaattcctatccaatttaaataatatatcagtgctgtttttattatttcaagtaactttattaataattgattacttaatgtcatatatttattctttcatatataatagggctagtgatcttcattccatttggcttttccaaccaatcttatgaaaaggcagagtagactgtgtttttccacttaatgtataaatctcaaacaatttactattttgtggttgtttagagatacttattaaaggatagagcaaggactggaacctagatttctaggtttttcttacaacagttctctcacatattgtaagtgaatcacttggtgaatatcaaaccaaacacactgatacaaccaacacccaaatccagaaacattgtcaacaccacagaaccccatctgtctctttgtagtcactacccaacattcccacatgctaaccttcttctgactttggccaacagactagtttcacctgtttttgtacttctatacatggaatcataaagtatgtaattgttttgtgtccagtttctttcatcaacattctgtttgtgagattcacccacattattgcatacaactatagttgtaagtaaatccttcatgtttatccctgtctagtattttcttggatataccataatttatttatccatcgcttcctcgatgggtatttgtgtgacctccaatttagaactgttacaaatagcactgctaggaaaatttttacactttttttggagaaagtatctacgcatgaccaaggacatatttctgggagtggaattgctggaccctaagtcatgcttgtttggctttagtaactaaactaaagctgttttcccaactgatttttcaaatttaaactctttccagtgctatatgagagtgctgtttgtgctacagtctcaccaataattaatattttctttattttgcattttaagtattccagtaggtatgtaatgttatatccttgtcatttgaatattaattttattgtgactaatgaagttaacaacttcttcatatatttactgtccatttggatatactctttattgaagtgtctttttaagacttttgactgtttttctcttggcttgatttggttttttatttatttgtagtacttttttccatctatattctaaatgatatgaggcacttgtctagtattgtatgtattgcaactacagttacccactctgtgagtttcctttccattctcaataatggcttttattgctctttttaaagttacatactttgtgaagaaaaatgtttacctcaaacatacttgtgtatttcttcataatgtttcctcaaccagtttcaactagctcacagtgaaatacatatacattaagacacatgacttggaaaataaattggagcgattggaaatgaaatagaataaacaacagagaaataataaaataaagtgtaattaaagtagaaagcttgggctcaagaaaagaagcatcaattttgtcattcataagagtcagtatatttatcaatggatgttcaaatttaattctgagcttcttggcatctgttgctgaaaggagaacattatacacatctcattatcacaaaaggagaagcccatcaatccctatagggaactgaagctttctctacactgaactctctgagaaattggtcatgtcacattttaaatacatgcaacataccatatctacatttttatcttttgcaagaaatgcagtgaaaatatcatccacaaaagatttcagtgagagctaagtacacgttattaaaatgtatcttggcaaattggattttgcctgatattaaattgttgtagtacatgtacgtagactttcggtggtccaatttgatctggaaatggaatttacagtgctcacagaaatgtgtagattgtatatattttagttattgttctcagttcatttcatgatgggagcaagatagctgcgtttttgtagttggcagggagaaaatgtgtaatatgataagagcacagagctgaacgacctgagagggtctgagtccaggaaagtttcctgaagggaatcatgtttggtgaaatataacagttgagaaggacctaggggagtgtgcaaaggctgagagagaccaggctcccagctactgtggttttcaatcttattttctgcctttttttttttgccataaataattatgttgtaagttctattcattatatacatgttaaaaattatttagattgcatatatattttatatattttgagagcatatagagtgtatatacctacctgtatgtttgtatagattgcaatgtacataattataataccttatatggaattttatggattccttctaatatgctaatattttacatgttgttgaaagctcataagcatttaaaaggcttcataaaattctatgctttgaatttgtcataatttactttgtctttcacttaggttgttttcaagtatttactattagtgtatacatagggttgaaattagtatctttctataaaaagttttttctgtattttacagtatttccttgaaatacaatttctgaagtagatgtactgggtcagagagcttatcaatcttaaaaccccaatcaaggttttattaatactgccacctgctgtgcttgaatgtgcctattctagctcctcctgtggcctgcctaaggggcttttgacttcccggaccttgcctgctgtctacctcctcatctgccagtgttgagggtcaggatctcagcacctctgaaacctattcatgatacaaatgagggggttgcaaacatctaaggctgtagttctcagattgcaaattgtaatcacttgaaagattcccatttaattcttctaagtgttctggggttgatttaattagtctttaattaggggttgagaacatctgggtacatagtatgatggggaagatctcagaaaactattttctagatggctactcaattttcccaaagacatttattatgtaatattttattccccattgctttgtgtgttctttttctttttgtgtgtttcataattctacataatagagatatttgagaggaatttttaacgaatgtccacagttttaattattgtggtaattaaaccacaacttggtaatatgttttagaaattggtggggctaatttatcctgttaattcccagaatgtttattttaaattttaacattttaccggtttaatcttccaaatgaccttttaataagatgtaaagtcgaacatcattttgagttggaaatgatcatataactcactagcaaataatgatcattgtataacagtcttcacttatagtaatataatttatcattccatgcttataggtatacattttcctaataaatatttttatatttattttataccaagccatctcactaaccaatgttttcactgaattgcatgtattttattttaatcatgttcttctacattttgaaaaatttaaatctacaaataaatatagaaatagaaaaagaggcatttattcaccatctagatttaataaacaatatttttaattgtaacattatattcttataagtaaaacaataacctcactaagagagccacagcttaatttgtactctgtcctttcattcctagaggcaagcaggatcctgaaatttgtatacattattcctaaatatgcataatgaatatatatgtattcgtatatcctatagatagatggatacagagatagatgcagagatatagagataatagaaattcaagaactgttcttcaggttactttttcatctgagctatttggttacagtgcaggtttctgtaatgccttcaggtcatattcagttcattaatagcagaatgctatcagtgtacgtaagacgttcagatgtgactttccccatcttgttagtattttgtgtcacaaagtaacagcaactgggtacaaattatactaacacagctaaatgcagagtgacacagagtaatagtgtcatagattatacctgtttgctatgggttcttcttcctagttctgtttgtgcacttgctcttggaagcatctaatgtgaggcaagcccaatctttgtagatccttacaatgtccctatcattttttcaaaaggcatagcactatactgtatttactccaatatttcatttttaaaggtaaggaatgtaatattttaactgtggtagttcattttaattagaatgattattaaatgctctggttacaaagttgcatgtatgtatagagctttgtaaacattattttccccataggtttccccatacactttgatatttctagttagccattttgttaaatggtggttctccaggaatgcatgtcctgttaatagcaaatttgtttacctgctatgtcatattccattgtgtgaataaaccagctttttagttcattctcatactgagggtccgttaggtttctacattgcagtatcataacatcctattgtaggattccttgtgcatgaaggccaaagttcaccagatttggaattgctgaaagatgaggtataacttcaactttaatagagtttgtcaaatttctcttcaaagtagtatataaatatttatattgtgaccaacagctaatgagaattcttttttccaaatgcttgtttccaagatcataaattgttggtatcagactaaaattgtaccaatctgaagtatatgaaataatatcttgttttaattttgcatttctctgattactagtggtcatgtttcctttttataggagttttatcatgtagatttcttcctctttagtgtgcatattcatagcctttgcccattttttctgttacattgtcagtccttttgttattgacatatagctgtacttaacatactctagatatggatatgttctggatatggtatgtacatattttcttgcagttagcgacttgtctttatacttatttttacatctttttaatacataaattttaaatttaactttaggtatttatacttatcacattcttcctttatggttttggtgtttttaaaaaatttttgtcggccaggcgtggttgctcacgcctgtaatcccagcactttgggaggctgacgcaggtgaatcacgaggtcaggagattgagaccatcccggctaacatggtgaaactccatctctactaaaatacaaaaaattagctgcatgtggtggcaggtgtctgtagtcccagctactcaggaggctgaggcaggggactcacttgaacccgggagccagagattgcagtgagctgagatagtgccactgcactccagcctggcaacagagtgaggctccatctttaaaaaaaaaaaaaaaaaaaaaaattgcctagtttcaaaagaatttttttgatcctaatattgtaaggtttcttctatgtgttttattcttataatgttcacacatacattgttaattatttaactgcaaatttacttttaagatgggaggtaaggctttcttttgatcttttccatatggagagccaccaagacagtaccatctatgaatactaactgagtactctgtattatgtcccattagtctctttgtctgtctctgaaccagtatcacactgcctttattgttgtagctttacaaattttgtatttagcgagatgagttcccccaatttgtttatatcctagttgacgtcgttgctttcttactatctataggaattttagaataagcggtcaagtttcatgaaaatttccttggagattttaactagaattttattcaaggtgcaatttgtgggacaatatcaatcatcttttttttttttgagacggagtcttgctctgtcacccaggctggagtgcagtggcgtgatctcagctcactgcaagctccaccttccgggttcacgccattatcctgcctcagcctcctgaatagctgggactacaggcgcccaccaccacccccagctaattttttgtatttttagtacaaaaaatttagtaacacccctgtgttagccaggatggtcttgatctcctgacctcgcgatccacctgcctttggcctcccaaagtgctgggattacaggcatgagccacttttttttttttttgagatggactcgctcagccacccaggctggagtgcagtggcataatctcagctcactgcaacctctgccccctgggttcaagtgattctcctgcctcagcctccaaagtagctgggactacaggcccgcgccaccacgcccagctaatttttgtatttttagtagaaacgggggtttcaccatgttagccaggatggtcttgatctcctgacctcatgatctgccctcctcagcctcccaaagttctgggattacatgcatgagccaccacgcccagccatttcaattttttatattcttaatttgctaagggtgtttttcttaattggaagtagtattgaattttatcagacacttgctgcatctgttgtgatgattataagatttgttcctcttcagtctgttaacgttaattatgtgaatacatatattctaatgctgaattatccttatattcttttacattatttaatcatgatgtatttagcttaaaaaaacaagcataaattattggtgtctctgatttaccaggcagcaaagtccttcctagtgatccaccacaaggtgcttttgtcatatcattccaagatgaggtactattgctagggtagtcttttcaaaactgtgtgttattgctagggtagttagtgtcttcaagatcaggtattattgctagggtagtgtcttagtaggctgggtctgtcataacacaataccatagactgggtggcttaaacatttatttctcatggttctggagactgggaagttcaaggtcaaggtgccaccattttggctcttggtgagggctctcttccgtgcttgcagatagccaccttcttgctgtgtcctcacatggctttcctccatacatgtttgtgaggagagcatctctctctctctctctctctctttcttgtagagccactaatcctggcctaaaggccccattctcaagacctattctaaccctaattactacccccaaagccccatcttaaaatacttcacattagggattagagcttcaacacattaattttggggaacacaaacagtcagtatcaggtaagagatgggattgctgtgtttggctcatctgtcaagactggaagaaggaccatctcttggagttcttggctgccagaatgaaacaatatttctataaactaaaagaaatcaaaaaccttcctttggaaagaaaactaaatgtgtgtaccacatttgcattctacaaaaaatatttattagattttaatgatttttttacatactcataatttttttgcagtgagaacagttaaatctactctcagtgattttcaagaatgcaattcattgtgattaactatagtcaccatgttgtacaatagatctcttgaatctatttctcctatttaactaaaattttatgtcctatcaccaacatcatcccaactccctcatctcccagcttctggtaagtacccttctactctttgcttctgtgagtctggcttttctagattccacgtatgatatggtttggctgtgtcctcacccgaatctcatcttgaattttagcttccataattctcacatgttgtgggagggacccagcaggacataattgaatcatggggagtggtttccctcatactattctcgtggtagtgaataagtctcacaatatctgatggttttataaggggtttcccctttcatttggctctcattctctctttgttgccaccatgtaagacatacctttcgccttccaccatgattgcgaggcttcttcagtcacgtggaactgtgagtctattaaacttctttttctttataaattacccagtctcaggtatgtctttattaccaataggagaatggactaatacaacatgtaagtgagattgtgtggtatttgtctttctgtgtctggcttatttcacatgcataaatattctccaggttcatcatagtgtcataaatgacaggatttctttttttttctcattccctcaagcacttactctttgtgttacaatactcttgtagtagttttaatccttctctttttaaggctgaatagtattccattgtctatatatgctacactttctttaactattcatccattggtggatgcttaggttgtttccataccttggctcttgtgaataatgctgtaataaacatgagagtgaagctatctctttgaatactgattcaaagagaatagaaagaagatattcaaagaatatcttctttgaatacaggttcaaagaagaaaagtggaattgctggattatatggtagtttaaattttaattttttgagggacctccgtactgttttttatagcagctgcaccattttgcattcctgccaacagtgtgcaagggttcccatttttccacatccccacaaacactagttatcttttgtctttttgatgataacggttctaacaagtgtgaatatctcattatgcttttaaattacagtgccctgatgattagtggtactgagcattttttcatatatctgctgggcatctgaatgtcttattttgacaaatgtctattcagtccctttgcccactttaaaaaatttgttcttttgctattgagttatttgagttcatgtttttcttttactattttgggtaattttaaacaattattttcattgtaaaagagaaaaattcttatgtagagtcttaagaaaatacataaaagagaaaagataaatctcaaatctcattttttagtgttaatcactcttgaattattcccacatctctacatgccttttttgtttgtagaattggagtcatatcatacatatatcatactatattttacattttagtatgaccaatatattctcattgctaatttattaatgttttttccttgattggatttatttatgctttggttttctttgtatgctatctctcgaactgacataccaattcttccagttttgataatggatttcttatttctactctcacatatttttttcttttgctttccattattaaacttttttactgagtttttgaattatttatttaatgcctctttttaacagttttattgagatgtaattcatatacatataattcactcagttacagtgtaacatacagtggcttttagtatattctcagagttgcacgtatatcaccacaatcaattttgaaacattttcctcatgctaaggaaaaaaaacccttaattatcatccaccaaatggcttattggtcccagctctaggaaattgttaagctattgtctctagaaatttgcctattctagacatttgtcttttgaaatacttttgtttgtaatagaaattattgttcttgttatttaaaagatatgtaattgtatttttgcttccctcttttatatggttgttacttatgaggaattatttttcctattggttggggctttctgattatggtttgattatgattttaaaaaatacaattgttgcttgatggttatttagtttctacagtctaagctgcttgaagtttattagagttttggtctagaataggatcattttctagaaatgttcctatgaaaacttgaaaaaaagactttttttgtctgtagttattctggatcattaaatgcagatcatttgtttcagtgggaaagatatcagagacatctatataaagatattattcctggctgggtgtggtggctcacgcctataatcccagcactttgggaggctgaggtgggaggattgcttgaggctacagttcaaaaccagcctgggaaacatagccagacccccgtctaaaacattttttaaataagccaggcattgtggcacataactgtaatcccagcttcttgggaggccgaggttggaggattgcttgagcacaggagaccaaggctgcagtgagctgtgatcatcactgcactccagcctcagtgacacagcgagaccccatctctttatatatatatatttcataaatataagttgtgtatagtaagaatttggtcagtcttaggcatatttgaaataggtacataagttttggtattcccttctgtttattttctatatccctatttagtaatccataaaaaattgtttaaagattttaaaaacatgactcactgctaaaaatcaaatgatatcatgtaatgtttatggcttttgtgattttgatcagtaagtagaaaatgcaaaagaaaacaagttataaacaataatcagaaaacaatggagaaaatgtcatcaaaatgtattttttcgtctttttttaaccatatcacagaacctagcaaattcatgtttcaggagctctgaaaatgacctgacaataggtaacaatatttatttatacttccttttgggcccagcattctagactttttctatgttatttatttcctggaaaatatatatttatacattcaatggataactttcatatttaatggccttaaaatgaaattttttaaaaagattcaggaagatatatatcattttgcttctgcttccttagtaagaattgacttaaaaatccatgtgccatatatacactactgaatagccataaaaaggaatgagattgtatcctttgcaaggacacagatgaagctggaagccatcatcctcagcaaaccaacacagacacggaaaaccaaacactgcatgttctcactcataagtgggagttgaacaatgagaacacgtggacacagggaggggaacaacacacacaggggcctttcgggggatgtggggtgaggggagggagagcatcaggacaaatagctaatgcatacggggcttaaaatctagattttgattgataggtgcagcaaatcaccatgacacacatatacctatataacaaacctgcttgttctgcacatgtatcctggaactttaaaataaaaataaaaataaaataaaaatctctatgcgacattgagggagttgtgaggacacatacttgaccagacagtggtcttatattggtgaaaagcacatcaaggtttaataactaggatgactgctgattttgtagtacctagaaaataagacaagagacattgagatttaatacttgaggtccaacaactgaaactttcaagcctgtgtgaggtaattagttagtctgtggtagtgaagaagtgttctgcttagggagagatttatttttaagttttttgtgtatatggaagaatcatagcctaaacacaaatttaagatattattattcatgaatttgcttctttttcaaagttactgtcattttgggaaaaaagtgtaaactgataatatcatacataataattatgttgtataaataataatttatattttagaattatcttcctaaaccagttcaagttagccattgatgtgacatagattagagaaagtaatactataaaaaaattatgtaataaatgccaaataaaataataaatacaagatagatcatggctaactaccttacttttgtggtttttgcttagaagaaaatctacagagaaatatatttcacaggttgtctattctaaattaaagtagctatgaataaatagtcccagagataagcagtaaatcctttaccaaattttctgtgtcctgcaatttatattttaaggttattttgcatgataaaactgtaacattgttttaaaattgagtaaaatgacacagtgttaaatattttcacttgagcacaaaaattttttgaatataacacggtatttaaatatagtttagaattttatatgatgtagtgattatagacagaacagtaacagttgtataaggtaaatactagtaactttaaacggtaatgatggatgcctctgtttatggtttatttcccattgaaatttcttaaggaaatgttatatttgctgatgatttcactagatggtacacacattcacacaaaattatcttctgtcattattaggagtaaatatgaagacgttttaggcagtcatcaaatataacttttacatacaaagaatgaagcataaatagccagtgtcttggtctcccctcccctcggtgctttgcacagtgtcatagacataggagatgctcagtaagaagtgttctggattttttaattctagcttagtgtgtgaaagtgattccgctcagaatgtccatcccctgttttacatttctttcatattcataacttacaggaaaaaagaggtaattaattgactaggatcttgcagatatataaaaggacccttctctgtatcacacttggccttcttatttatgtgcagaatttgattgatttgaaacttatcaacacttgatactgcaacaaattgacaagaatgatgttttagtaaaaccaaagaaaccagaaatgttgggaggtgtgatgtttaatactgagtgctaattggattgaaggatgtaaagtattgatcctgggtgtgtctgttgctaaaggagattaacatttgaatcagtgggctgggagaggcagacccatccttaacctgagtggcacgggttaatcagctgccagcacggctagaatataagcaggcagaaaaatgtgaacagagagactggcctagcctcccagcctacgtctttctcccatgctggatgcttcttgctctagaacaacatcggactctaagttcttcagttttggaactcagactggctctccttgctcatatatatatatatatatatatatatatatatatatatacacatacatatatatgtatatatatgtatatatatatgtatatatatatataactataaatatatatgtaaaactatatatatatataactataaatatatatgtaaaactatatatatatatatatattccattagttctgtccctccagagacccctgactaatacaggaggttatcaaaagcatgtatcagcaccagtacactgggtatattagacaaaattgaaatgcttctagtgacctacgtagtacaaacaccaagtttacccagagctaatgcagggaaagccagaatcaaccaatcaaccagattgagcgagccaggataggacttaagctgaccaagacagaggagacagtttaaggtgatttcacatagacaataattttactcagaatccagacctagatcccaaggtaaactaagatccagccaagagtattagtaatgggagacggggctcaggaaatgtagagattcatcttaatccacaaatatccttaaaattcttagtctcccattaggagacacctgggctaacatcatattttctggaaagaagggagaacattctggagtgcagatgataagtgggctaaaaaatgatttcagactgctgtgctgatgttagcacttttcataacaatttaagttttactattctaaaataattaattcaacctattaattttactctatggttttttaaccatagatctcacctctctaactctagtcaatcactcagtgataagtggcatttgtcattaaagaaagtgggttggagtgaatctgctgaaacgtattaaaatattggaaaaccaagtcagaacttgtattcagggccggggctgtggctcacgcctgtaattccagcactttgggaggccgaggcaggcagatcacctgaggtcaggagtttgaaaccagtctggccatcgtggtgaaaccccgtctctaataaaaatacaaaaaaattagccaggcgtggtggcacctgcctgttatcccagctactcgggaggctgaggcatgagaatcgcttgaaccccaggaggcggaggttgcagtgactgagatcggaccactgcactccagcctgcgcgacagagtgagactccatctcaaaaaaacaaaaccaaaccaaacaaaccaaaaaacttgtattcagtttatagtggaaaatccatatcatcaattttccattgtcagatttgaaaatctcttctcaaatcaataattattttctaaagtatcaatgagattcacgcacacagttaacaggtaaagtatagaaaatggcttttctgaacctatcaatccctgaccgcagcctactcccctcccccaggttcacatcccttcacctctaccacatttaacccttttttatttcaaatattaaaataaaaccatttcaaatctctacgtattatgcttatactactacttttttcaaaagcttaattgaagtatcaacaataaaccatatatattatagaatgtgataagccttgacagcaatcaagataatgaatatattcatcccctctttttaatccctcacactcactccttccccccttctccagttagccaatgatctgctttcttttactatcaatgagtttgcattttgtagagtttacataaatcaaattatacaggatgtattttctatggatctttttagtcatcagaattattttgagatgcattcatttgtatgtaatactttattcctttttattgctggaaaggattccatttatatggatatagcatactttgtttaaccacctgctgttgacttgggtggtgtccagtgcatgattgttaaaaacaagtacatactctgaacattgttgtacaagtatttgcatggatgtatgtttatctcatttggctaaatatctgaaagtggactagctgcaccgactgtcaagaaggtgagaggatcaaaactccaccatgtcagcttttcctcggctggcacatgaagttattaatggcaataacaagaatatccttgccatccctgagacatacgaaagatcttacagggatatagtttatacttattacagagtatgtataatcctgcttattacatgaagatcattctcctggggcacaaaataaaaggaaacatatttctttttttatttttttgagacggggtcttgctctgtcgcccaggctggagtgcaatggcgtgatctcagctcactgcaacctccacctcccgggttcaagggattctcctgcctcagtcccctgagtatctgggactacaggcatgcaccaccatgcccaactgattttgtattttcagtagagatggggtttcgccatgttggccaggctggtctcgaactcctgacctcagatgatctgcccgcctcggcctcccaaagtgctggcattatagacgtgagccaccgcacccagccaaggaaacatatttcttactgtaataagtgtaaactgtatcactgaatatagtaatactttcatattatgggaacattcaccattgatttatatatgctattaaatacatagtttctatagaagctttattgaaatgtcatcagattatgaaaaccaaatccccataatttttccactcatgtatatttacatttgcattcactgtctccattgttgattacccaatgtgtactgatgtttctccttacaaactatgatagtacttaacattttgcttcatttgttgatactgatttgttccgtgtacataaaacttaaatttatgtctgccttcacttattttctttcaaagataccttaggagtctttcacattttataagaaaccataaattttatttcagccttaggccaaccgctggctttcttgccaacctagatgcatatatgcaatttagtctgtgagttttgaaaatttgaatgatagcacattaaactggaataatgaaccaataaaagtttttatggcatttggaaaaattacttctcaaacattcacactgtcattttactcattaaaattattctaggatcataagttagaccatgtattcctaaggcttgaaaaatcaacagattatttctaatgatcattgatttgacctgactgcaggatgataaaatcttattttggaaagctagactaggcatttgtaattatattttccatcttcaactaatagagtaaaattattggaaactctttaagatagtgtccacaatgctgtttacagtttaagtgctatgatttgccacagttattatcttcatatagtcactgccagtgtgtgacattgggtttcatcagtaaataagactactgccacaacttcagagggttttcagagagattaaattaaatgttattgtgaagtacaaggtacttgctcagcaatatggaagtcacaggtattatgtgctcagatggtaggtagttttgtatttttcacaaatctattaacatataattgtcctgtcctataaaccagacctttagggattttataggattctaatctttttcttgatgctttagccactagtggtcgtgagttacgtgctcaggaaggcatgtgaatgcttatgagtgagtaaggtactattcatgtttgtctaatgacttcattggcctttaccttcgtttacaaatgcacttaattcaataaggaagagtccttctcctgaaggttttacactagtcaaagatgtttccaagccatatacattatttttatttgtgtttatgcatatgatacaagccattttagaaatgatttttttttttactctttagaaagcacttcagagttagcataacatctaaccatattggtatttctgttttctgttataatgagtgaggatgatccttatttttaaaagaagtaataaaaaatcaaagaagaaaaaatttcatatctaagcattttagattataatttggcaactgtgcattaatccaaacaaatagagcctactgagattattcatgttcccattagtcactcacatattggtgtctaattgtcatttgtttctgctgtaattcagttcaactgatgtaattaaataccattcatctagcagcagttctgaaatcttttttttttgtaagacatgataaaaagtatgagttttctataaaatcaagtttacattcagttggaaattttccttttaagttcttattctcaaacttaattgtcaatatcaaatagagcttctcagatgagggatataggctaatttcaaattttctctgaactacaaatatgctcttcattttctctagtctaggcctaaattgctgtgcttgcatttgtaatcagaaattgattgtgttactgtggaaactggaagagtgtattgctggttaaagaaaaatgtggtagaagaactgctgttattataattgtctgccatcttaaatgcctatcattttgaacaatacattgataacattttcacactccaaccccaaaatgcttctctccagaacactgctttgtggtcagtattagtcttctgtatcgatctgacataaaatgccttggtcacatttctaatttgtttctatgttgaactataatttttacatggaatgaaattagtttccattttattcatacttacatggcacatcttagggaaaaaacatgaagtatggtaaaatatcagttatttagaagccagtcatctgaaacatttcaacttctgaccaagaagacacgaaacaagttccaaaaattcagatgaagaatttttaacatctgatgctaaagacagcctcgaagaagcaaagctctattttacacacatacacacacatgcacacacacgcaaagcaatattatgcattttactgtgtgaaagcaaagatgaactctgtttttaaaaagtttgccttttgtatatgagaggcaagtatgtgaagactgaccaaaagaatgaagaggaaatcaaaaccaggaagaggaaaatgaccctcagtagaggcaagagttgggggagttaggattggagatttccagcacatattctgttggaccagtatccagtaacatcaagttcctggaattttctggaggtttccattgctttcctgattgtgacaaggacaaatgcagaaaattatctgtgactttatagtttaattaaaatattcccaaagccccacaagtcttgtcttaggaaaccaatgtttcccaaaaggcatcaacctgctgaaaaaggttaacagaacatagcatctatgtactttaaaccctggctgaaaagagactgaatgtggtggcacactttagctctagagtgttgaggacgagaataatgttgtagttactttagtttgattttcgtatgtagtaccagacactaaacaaatctgctttagcagaaaaatattaaaatacataataatatgtgtgacatagtctaaataatgcattgcctgtttaatgtattgttgagatttgtatgctagctctttggatcctcctggcttgggttcttcattccaccatatactttatttttctttaggcttttatgtatttatgtatttatttatttttatttaaaacttattaatgttattttgattcacaaaccataattctatcattttgggggcacaatgtgatgttttgatatatgtatacaatgtggcatgattaaatcaagctaattacatattcatcatcttgctcaccatttcttatggggagacacttgaaatttactctcttactttgaaatacataacacattattattgattatagtcatcctgctgtgcagtagatctcaaaatatgtttcttctttctacctgagactttgcacccttcgatcaacaactcctcattccctccctctccacccccaccccacctcagcctttagtagccatgatacttcctacttctatgagttcaactttgttatagtctacataaacctgagagcatgtggtatttttctttctatgccctgataatttcatgtagcatagtgtcctccacattcatccatgttgttgcaaatgacagcattttgctctttcttaaggctgaatagtattacatttaatttatatcgcaattttttatccatttgtccattgatgaacacttaggttgattccatgtcttgactattgtgaatgatatggtttggctctgtgtccccacccaaattcatctcgaattgtaatctccatgtgtcagaggaggaacctagtgggagatgattggatcatgggagataattcgatcattcccccatgctgttctcatgatagtgagtgagttctcatgagatctgatggcttaaaagtgtgtagcttttttcactctctctctctctgtctctttcctgccactatgtaagacatgccttgcttccccttcaccttctgccatgattgtaattttcctgaggccttcccagccatgcaggagtgtgagttaattaaacctcttttctttataaattacccagtctcaggtagttctttatagcagtgtgaaaatagactactacagtgaataatcctgctatgaacatgggagtgcagatatctctttgacatattgatttcagttccttatgatgtatactcagaagtgggattactgggtcatatggtagttctgtttttagtttatggcagaatcttcataccatttctcataatggcaatactaatttacattcccctcatcaatatgtaagagctcctttttctctgcatcttccccagaatttgctttctttcattttttgatacaagccattctaacaaatgtaaggtgatatctttttgtttttaatatgcattttccaaatgattagtgatgctgagaattttttcatatacttgtcagccatttgtatctctttttttgagaaatgtctgttcaggccctttgtccaatttttaatcaggttatttgttttcttgctttgagttgtttgagttccatataccatcagatgtatggtttgcaaatattgtctcccattctgtgggttgtctcttcggtttgttattgtttcctttgctgtgcagaaactttttagtttgatgccatccatttgtctattttgcttttccttttattgcctgtgcttttggagttatatccaaaaaataactgcccagaccaatgttgtggagcttcctcccagtgttttcttctagttgtcttaccctttcaggtcttatagttaagtttttttttttatctcttttgagtgatttttacatatgatataagagcctaattttattcttctgcatgtgaatattcagtggtctcaacaccatttattgaagagattgtattttccccattgtgtgttcttggtacctatttcagaaatcagttcgccataaatgcatgggttttcatgtctgtttttatggcagtacaatgtcattacgtcaattttttggaagagttggagaagtattggtgttagttctttaattgttttgtagaattccacagtaaagccatccagtgctgggctttcctttggtgggggacttttacaggcatgtaaaagtcttattcaatctctttacttactactggtctgttcagatattctatttcttcatgattcagtcttggaaagttctatgtgtctaggaatttatccgtttcttctagattatacagtgtgttggcatataatttttcatactggtttcttatgatcctttgtatttttgtagtatcattcgtgatgtctcctctttcacttgtgatcttatttatttgagaaagctttcttttttttctaattcatctaactaagggtttgtcaattttgtgtatctttgcaaaaacctgttagtttggttgtttttaaattatcttttagtttctaatttgtttattatttattctctgatctttgtcattttctttcttctgctaatttagtggttggtttgtatttctctttttagctccttgaggtatgacattagattgtttatttcttctttttcttcttcctcctcctcctccttcttcttccttttcctcttcttctattttttgagacagagtcttgctctgttgcccaggttggagtgcagtggtgcaatctcggctcactgcaacctctgcctccctggttcaagtgattctcctgcctcagcctcctgagtagctgggattacaggcacccgccaccatgcccggctaatttttatatttttaagtagagacggggtttcaccatgttggtcaggctggtcttgaattcctgacctcaaatggtccacccaccttggcctcccaaagttctgggattacaggcatgagccatggcacctagccctttcttctttttttgatatgaacacttatcactataaatttccctttcgggactgcttttgcttcattccatacgttttggtgtgttgtatttccatttgcatttgtctcaaacatttgtcacaaaatgtttttttttaatttcctttttttatttcttctgtgacccagtggtgttcaaggagcatattgtttaatttctgcatatttgtgtatttttcaagattttttctcatccatttcttgtttcatgccattgtgatctgaaaaaaatacttaatattatttcagtcctcttaaatttgttaagtttggttttgtggcctaacatggtctatcctgaagaatgttagatgatcacttgagaaaaatgtatattctgctcttgttggatggaatgttctgtttatgtctgttagatccatttgttttaaagtttaattcaagtccaatgtttctttattgatattctgtttagataatctattcattgttgaaagtggcgtattaaggtcctctactattatagtattgcagtctttcttttccgattatttaataattgctttctgtatataggtgctctaatattgggtgcaaatatatttataattgttaggtcttcatggtgaactaacccctttatcattatgtaataatcttctcgtcccttttaataattttttttacttaacgtctactttgtgtgttataagtgtagctacttctgctcactttcagtttatatttgcatgaaatatctttttccaggcctacattttcagtctatgtgtgtcatgactagtgaagtgaccctcttataggcagcatgtggttggatctttttttaaaaatttatttagattctctgagtctttctattgggtaatttaatccatttacatttaaggtaattattgcaaggtaagggcttgctattgccattttgtaaattttttttattgttgttttgtagttccctttttactttctctcttgctatctttctttgtggtttgatagttttctgtggttgtatgctttgagtcctttttaaaagtaatttgtagaattattctatttgcttcgtagtcaccatgagacttacataaatatcttttccttataagaggccactttaagctgagaacaactttcctataattgcatgtaaaaactctaaaacactctttacaatacaacctttatcatagattaaatactcatatattcttggatttttttttctggactcacgattctgttctactgtctatttttctatttctgcaacaatactattttgccttgcttattgtgaatttatgttctatgttgctatttattataaatatcaaaattttgttatagttttactttatattttcttaatatgatcaatgcaatgttctatttccagtttatttgaagtttaaatcttaactaggtgttaactgttgaggtgatcatcagtttgctaatattttgtttgtgaattttatatttgtgttcataattgatactgatctataatttttatttgtatattattctttttgaatatcactgtctactgtgaaaataaaactggcattagaagattaaagaaacattatataaatataacatgggggccacacactgtggctcacgcctgtaatcccagcactttgggaggctgacatgggtggatcacctgaagtcaggagtttgagaccagcctgactaacatggtgaaagatgagcagatcacctgaggtcaggagttcgagaccagcctgactaacacagtgaaaccctgtctctactaaaaatacaaaaattagccgggcgtgttggtgcacacatgtaatcccagctacttgggaggctgaggcaggagaatcgcttgaacctgggaagtggagtttcagtgagctgagatggtgccactgcactccagcctggatggcagagcgagactctgtctaaaaaataaataaataaataaataaaattaaaataaaacatggttgctacacatgcatgaggaagtaagatacattggcttgactaatgcataaaatacactggatatcaataataaaaagaccaatattctgtagaaaaatatgagaaagagatatgaataggcaatttacagaaatgaaaacaagaatggcccccaaaaatatgagggtgaaaaataccatgtcaaatgaaatgaaaattatactcgaattattctctcctatgaggttgtcaatagtacgaaagtctgaaaacttactttaatggcaatgctgtaggaaatcaggcactctcatacatttctggtgggagtgcaagttggtattaattttatggatggaaaatgttgaacatcaattaaatataaaccaaattaaaaagatatagtggcttgggtgtccaaatactacagttttattattagctttcttatctgacagccgtgtaagattttacatgtcattatttttcttgatctattaccttttttaaaatgaactatttgaaatgtgtaatttttatagactttacaagctctagactctagtgatatatatatgtcacacagctgatatctgcacatgaccctaaatatgcataaatttatgttatccatgaatgaaagaacggctctttttcttaatttcttttttcttgactatagcatattttcatcctgtgtataggatttacaaatcagtttttacctgattttgaactgttccatcttcaaccagttgccatatgactacttggttcattatttgtggtaccatttttgtagataaaaatatgtagatgataatatgggtttgttgtgcatattcagaagcactgtactgtaatcattaagaacatggacaagagagccagattacctggcttggaaatcccagatatactatccatgtgctgagtgcattggttcatctctttcacagttttctcacctataaaagaggttaataagagtgtatgcctcctggggctatgaggattaaataatctattcaaaacactaagaccattacctgctaaatatacatttgctatttttattcatatgaggatatagatgtctatatcatgaattgaaaataagccatttttttgaaaagcagtatacatttctgaagtcttgaacatgaataatatttaagcatatttcactaaaaaatgacatgattttgacccactatataaaaaattataagattttggaaagttcttcatattgtagtgtttaaagacttgaaacccagtgtttctagccattgaagaaaacttagactacttctgcataaattgacatggaattgcctttattattgatctgaataaagtgggtggaggaacattcatctgatgaggagaagcagctccctagaacacagagatattcagatgttttccactatttacaattcatcttgtttattaacctttaaaagcagattccgttgaagaaaacaaattggcactacaaggagtaagaatgcttttgttagtgagggactcacagtgcctttccaattcatacattgtcttctgatgagtgtgggtattgggctagaattttggcatctgaaagtacatctatgtgagccgtggctcacataaccatggctgtaggttatgtgagctgtgagaattttcaaattacctcagacttctgagaatattcttggtcattgagaaaataagcagtaataaatgctccagattcacatccacatctcacaatgttgaaagaatagtgggtatcatttatttaaatgaattttacaatatgcttactccattatttcattttcttaggaattattctcccagctttactaatagttgtggtgactcatatctttctcactactttgaccaggtctgaatatactttggggtacaagagatgtgtattcgttggctatataaaggtggtcgatctgctaaggaatcttagatggccagagttactggaaattcactcaatagaatgggtgattatataggaactattatttttgctgttaatataaatgcatcttcaggtatattatttgtgtttgacacactgttctaaaagtccgatattaggactgtttttcttaaaaataaatattcaaatatttatgattgtgccttagctatggttgccagaaatagagcctgaagcaggaattgtgtgcatagatttgtgcaaggagcaagtgaagcaagagggcagagagaagatgagcaaggatatggcttcaagtaaagttgagcctcaacttgatcccacaaacagattataccaaagtttcattcctgattgatttgaggcaaaggagggaggcttggtacacgagagctcttcttgcagcagtcagtcgtcggctactgatctgactactccaagtgcggtgtatgactcccaggtgcctctaggcaaggctactccagtatgctaagcacgatccttcagaaaaggttacaggtgtcagctgtcagccatggcacacacaggagtccctgggatctacatgggacatcaacatccaaacataaacaaaggcagcactttcatcacatcacatgtggactactgcagatggagtcagctctgtggtgatcagcagaaggggatttcaggctgactgaagcaccaggccacgctgtcagaggcaggagtgagtgtctaatgtttaaggagcattgtgagaggatccttgtgagagaagggggacagtggcagatgaggagctcagggaaataggaaagaaccagggtaccaagagacttgtgagccaaactaggcgcttatgttttatgtgtcaggcaaagccgatgggggtgtgtgatggtttgatgtgatggaggaaccacacggaggtcagtgtggctggaggaaagtgagccaggtagagctgagatggtaggaactgagatgagatagtgggacgtttagaaagtgtgaggctgtagaggtcttgggaaggcctttggcttttacctctttttccccaggtgggacgggccgttgaaggattttagggtggcagtgacatggtgaaaggatcactccagatactccgcccagagtataccattgtgctctgtggtgaaacagggagaccagttaggaggatttttgcagtggttgaggcaaaaagagatggggactcagatgagggttgtcatagtggagatgtggaaatgtgaataaattcagggtagatggtctaactgccagcacttactgatggcttggccgggcagggtctagggatttgtgggatcacatagcagagtagaatcttctggccttctttctggccactcttcaccacagggcccagtgtcctcatggtggctgatgccccagcccgcctcgtgtgattagataggatagatcagatttccctaccacatgtgcccctagaaactcagattcctctgtttaacccaagcaaagccatttagctccccaccttatccctgagtccaactctgcttatccagaaatgaattatttgttggcagtgctaaacaaaatgccatctgtggttgggtcttaaccctgtagcaatatagatgagctgagctggtagaagttgtaaaaattatatttcttttttatttcttactacaattctttttaaatataaaggcgcaggatcacgatttatttgcttgtcagtatggagtattctattccctttagaaagcataggaagttttggttttgcatgtctcagtctgctctactgtctgtgctatgcagtgtgccagttatatctcttttaatattagagtcccatgtattagatgataatattctaatcttataggtggagaatttgagtcacaagggttaagtgacttgctgaagataaaacacccagtagagtgaatttcaaaacctgagtgaggctgggcacggtggctcacgcctgtaatcccagcactttgggaggctgaggcaggcagatcacgaggtcaagagaccaagaccatcttggacaacatgatgaaaccccgtctctactaaaagtgcaaaaatcagctgggcatggtggttcacgcctgtaatcccagcttctcgagaggctggggcaggagaattgcttgaaccagggagatggaggttgcagtgagccgagatagcaccactgcactccagcctggtgacacagcgagactccatctcaaaaaaaaaaaaaaaaagaaacccccccccaaaaaaaaacccctgagtgacactaaatttacatgttataaagtctctaaacattcaaagaaacaagcagatctaatgccaagttccacgtgggcagggagctctgctgtcatgttcattgtatcaccatccttgatgacattaactggactttagtaggttctcaataaataataaatcaagtgaatgaggcattgtccgtgtggcactggaaacatggaggaaggagaacttaatcctgatggggagctttggtagatgtggtatttcaagggctctctaaaaccaagaaagagttcagcaggttgagaatggaaatccttttactccaaggtaagaatacacagtgaaaaaagccaaagagttatgtaaggcatgtttctcttctgtggaacaaacattgggaattgacattagagagctcatctatgatggatggcttaggaccttgacctccttgttaaggagtttgtacttcatctctgtccacacaggtgagcctttgggggtgttaaggagtgaggatcatgaggtacctgggattccttttctttagtgttgtactcgtgatttttagcttaaaaggccagaagtgtatagggatttttaaaaaaggctttagaaaacgatgtctattttggtcataacagcacttaatatggcagggataaccatggatgttgactttgcgttctttcattatgcatgctatttcacattatgtgaataggtggttatttgtatcttgttgcatgctaaatatatcagatttaaaaatcaattttacatatagaacactgactaatcaatttaggaagcagattagttttgcgtttttcagagctctattgatttgattataatgttgttttacaacaaagtataactttgatttatgttcagatgttaagtatttatactagtttaccatatatgtgcactatgttgtttctttaatgacactgaatgggccaggttttcactttaatggcatttaggaatacatttaactaaaaacatccactcaaatgcacgtgggttatgtttgcatgaaatcaattaatgatcctggcaggttctgtgtttttctaaattttaggacttgcctcacacaaatcagaagtatccagactttcaaatttacaatatccattcaaacttgaaatgcccttgattaataaaaatacatgtgacaggagagtatagctctgcttttaagctgttagagagaacataaaatgattatggcttgcagtaaatgttattatggacctgagatgtttcctcagggattcagcaatctcctgcactttctttaagactgaccctctctccttgagaagcagcaggaaggagggatgtggaggcaagaccgctgtcaggtcacctgtcacaacgctgacaaggctctgatataaaacctaatttacagttgaagaagcacatccattatccttctgattttaaaatagaacatacatcagcaaaatgataaaagaaagtgcttaagaattatgaatgtcaaggactatttcctatcataaagtcacaaccctttttgaatattaccttaaattatagcagagtttaacgatattcacaggctctgttctctgaaaatgagtatcacagtatttcaactattgataagctaataattgtgtattaactatcgactgtctttgagatcaagatctaggtagatggtggcatcagtatttagatatttctttatgaaatagatgtgcaccagaactttgctacaaggacttaaataatgaattattttctgttgacttatattaaaagtacagcgttgttttatcttcatttataattaaccttcagtcggccatgtttcttccttattcctgattcatctttttcctgttattctcaactaaagacggatatcaaacaaatcctggaatgtatttttaaaaactcgactatcttcttgaagtgaaaataaactgttaaagtgtctgctctaagaccttggattttcttttaaaatggggtgctccaggcccggcatggtggctcacgcctgtaattccagtattttgggagggcgatgtgggcagatcacgaggtcaggagatcgagaccatcctggctaacatggtgaaaccccgtctctactaaaaatacaaaaaattagccagttgtggtggcacacacctgcagtcccagctactccggaggctgaggcaggagaattgcttgaacccaggaggcggaggttgcagggagccaggattgtgccactgcactgcatcctgggtgacagagcgagactccatcacaaaaaaaggggggagggggagttgctccatattattgtcatcataaatttcattgcaaaaattatgtattttaataattggtgttatggattagataattttaatctttttagcattgttttaatattttcttataactgaatcaacacaaatttaaatgatttataatgggctaatttattagaataatatttgagatttcacaatttagaagcagaaatgttgaaatagcctattctagcaaaaactcagcattatccttaaattacccatgtccatatttagagatagaagatataatttcttatctattaactattttctgcttttaaaactaattgttcttcccatctctgctatatttgaatggactatccttagattgtcttcttcatgtctgagaattttatatttaaatatatgtttaatatacaagtaagaacagacattaaaaaaacctctggaatccaaacttttttttttttttgagacagagtcttgctctgttgcccaggctggagtgcagtggcatgatctcggctcagtgcaacctctgcttcctgggttcaagcgtttctcctgcctcagcctccctagtagctgggattacaggcacctgccaccacacccggctattttttttgtatttttagtagagacggggtttcaccatgttggtcaggctggtcttgaacccctgacctcgtgatctacccacctcagactcccaaagtgctgggattacaggcgtgagccaccgtgcccggcctggaaaccaaacttttacatttatattcatatatacatacctatttatcatcatcatcatcatcatcttgttctctctacctatctattcataaatctattatctatctttgtatctacttacctacctacctgcttgcctgaatattagtcctatctgagccaacaaggctaagatgcattttgaatttgactcttggccttttgtaagtctgccaattgtagaataaatgtccagcacgcatgctaaggcctccttattcaagggagagggaaacccttgaaaacattttactctactctgactcagtacccagtactattttccagtgcaactctaccccctttcctcgcccccaactaaaccctccaggtccataaaactgtgggagccttttgtttatggctctctcaacagtgagaccacgtctacatctgctgatccacttgaccggtgacctgtgtccattccatgtgggaacatggaaaagggagagtcagagctttcttgattttagcctcttgtttgtaccattatcgtaagtgatggtaacatagtggtaccagtttggatgtattttagatttttctcttctagaagagctattaagattaaaataatctctttttctcaaaattttgtagaacatttctggagcatttcggggggcatttctttagataaacatgtataactatttaatattttatacagtgattggattctttaaatgctaattttgtagaacatttctggagcatttttgggcatttctttagataaacacatataactatttaatattttatacaatgattgaattctttaaatgctatgggagtattcaatcttggtgtttcttcttttttcttttttaagaagttttattttatttttagttgacaaataatatttgtgtatacttacagagtacaatgtcatgtgtcaagatatgtggatacactggaatgatcaaatcaggctcattagcatatctgtcactcaactatttatcatttctttgtggtgaaaacatttaaaattctctctttagctatttaaaaatatgtaatacattatgattaactatagtcacagtgctgtgcagtaggacaccagaaattactcctgctacctatctgaaactttgtccccattgaccaacgcctcctctttccctgcccagcctctggtaaccaccattctactctctagttctatgagcttgacatttttagatttcacatgcaagtgagtgcatatggtatttgtttctctgtgcctggcttatttcgcttgatgttttctaggtttacctttctcatgttgtcgcaaatgatagaatttcctgtttattttaaaaatggaatagcattccattgtgtatttataccacatttaaaaaaatctattgatggacccttaggttgcttccatatcttagatcttgtgaataattctgcaatgaacagaggagtgcaaacaccttttcaatgtactgatttgagatcctttgtgtttatacccagaagtgggattgccagatcatacgataattctgtttttgtttcttgaatctattttgtttcttgaatctccataatgttttcaaaatggctgtacgaattttgatatttcttcttgagtcagttttctaagttatatttttctaaagatttttaatctgaattttcaaattggttgcataaaattatttaatatgttcatattttaaatttctgatctatctgtgatagaaattaagtcgggcatctaactcagtagtttttcttttctaaaaaatgtaaatataaaaggctataaatttccttctaagtactgattctcacactttttttctatagtatgttctttactgttcagtttgtgaaatttttaaatttgcattttcgtttattctttggcccgtgtgttattttgaagcatttaataatttttaaatatatacagtttttaaattattgacttaattgcaacatggaaaaacacacggagtctatgatattgtgaagacatactttatggtgtaatacatgatacagttttataaggttttcaggagtactacagaagaatgtaacgttattgaattgtccatatgttctatattttatatgtgtgtatgtatgaatttgttcatttaagagttttttttgttctacttaactatttgacttagtaaaggagagagctgggctaaagttttccactgttatgatagatgtgcttatttctttcagttgttatatatttttatttctatatttacataaagttcagaatcattatatccttctggtgactataatttttatcattatgcattgacccttttttctcttaaagtgtttcttcttccttaaagcctatttgccttatatatctatttcagctttcttttgtttaacgtttacttggaatatatttttcatcttttacttcaatattttcatatccttaggtgtttttttttgtttttgtgattttttttggtggctgtcttaaaaatagaaaataagttgggtttcatttatcttatacattctgacaatttggggagaatttaacatatttacatttattgtgatcattgatatgtttagatttatttctgccttatcagtaaagaattttgttttcttattctatgactatttttaaaaattattatttttaactgattactttgttacttattatatggggtttccccctcctttttgaggattaatacatgctatttctattcttttagccattatttttgaatttttactacacatattttccttaataaaatctaaatttaaactagttttatttatttttcaaacagtgtaggaaatgttagaataatcaaactgcaatcaccactcccctgaattaatctgtgtttttcactattttagttttttcctttttaaaaatcccacaaattagatgttatgtttattactttaaataggtgattggagagatgtacaagatgtttagcattgtatttgcataccattatttttgcatcttattcttctgaaatcattttccttcttaaagagcatgatttaccattgcctttaatgaatatctcctggtgattaactgtttatgctcaggtgaatgttttcattttactgtcatttctgaaagataaatattctgggtatgtaattagaggataatagtgattgtctctcagtacttcaaatatattattcaacaaccttgtggtttctgttgttgagaagtctgctgtttttctaattattgttctttttttgatgatttgccttttttctctggatgtttttctaatttcctctgagtcttttttatcagacagttttgctttgatctcttggcattgatttcacttattgtgctttcaatacattagaaacattatttattgcatttggggaatttggaaaatcacagccattttattttcaagtattatatctcctatatttctctaggacttaggtaactgttaggctttctcattctctgctctagatattttatattttaatttttaaaatatttcaacataatttgttcagctatattttctatattatggattctctcttcagccaagaaagtctaagttgatcaaagtttttatggactttttcactgaattctgaaatactaatatatggggggtgttacctgtccttctaaaatgcctttgaacctttcttattttcttaaagcagattttctaactataacctaaatccacacatttgactgacaatgctcactttaagtccaaattattttgggaatttaaactcagaagtgagcttaaactttgatatttgtgggaagactctcttggctacctttcatggctgttataaacacttcctgtttgtatagcactctgtgcttaaccctgttgattaacttcctgtgtcttacaattgcccatttttctgtcttaatccaactctatattgcaaactgagggctcccttttcccaccatggtaaatgtggaggcagcttcctggaagaggccttgaggtcacatcacaaacagtaaaacagcatatgggggagaatctcctcggaagaggacagactaaacttgtaatctgcacaccttttatttaaaccctctcagtatattaaagtcctccaagaaagacagttgtcatagggagtggtctagacatagccaacttttcctccatgaaaagaataagcctttattttgttcagccactgggagtttcgaggtggttttttactgctctaaaacctaacttatcctaataccggggacaaacgttatttactctggtgacaaacattatttctattttacaagtgaggataaactgttagggaggttaaattacttgttcaaagctcatacgtgttgtagcaaggactaagtagtcttaggcatagggctcagctttttaaacctaccttgatggtttttgtgcctcgtctatagggatagtattttctactccaaagtatatgccatgatgatccagaggatattgatcatgcactggtaagaagaatgtctctgtataaacaaatgttggtataatataaacattgataaattgtgagcagcgatctttaccttagctctgaatgtctaaatttcacttggaatttttcagtagatttatatgaactcaagcattatcctacttaaaagaaggttagcaaaaaaaaaaaagaaaagaaaacttatcaaaagacttttttaaatccaaaatgacactatataagtgtcatataatttataggttaaggaagctatagataatgatatcattatgactgattcttattgattacattaaagtgatattaggcatttcggatttttcagatgtttttcttgaggcctcctagattttaaaaatgataaacttatagcagttttagtggccctcattatttttatgagtgacttcagggctatcacaaataaatgaaaagtctatgcaatttcaaggcaaaccaattaatgcccccttccacctaaattatctcaatatttcctacagataggtcctagagtaatgctgctaaggctttttaaacttgaattccacagatgcaatcctttcagactttaaaaatgtttattctcctcagtgttatatattccaccaggtatccttttccaagataattctatttcaattgaaaatcttttaattcattgcacaattatagttgagcatttcttggcacaactacccagatttgcaaggccatagctcttaggtgcctatctgactgaaccttgaacctatggcatccattgtagctggtgataaaagttatatcagctccattttccacagttcttaactgttaagaacaaccctctctagctttctcataaatcaactttgggattattggcatatgagctttgttcaatttttcaagccacataaaatagattttttccatttcatcaatcacatttcctcaacttttgctcttgatggccaactgcaggggcagttttcagaggctctgtcactcatttggtctcctcatttctgtttgattattgttatatacacctgcattttcattgcaggcatcctcctcttctcagtagggctttgattactcacactactttttgcttaacagacttgattttaatgagctaaataataagaaatctgacaaaataagcataaatatagcaaccattttctggactaataaacaacttggtgccctagtaattccattggtaatgtaaagatgtgactgcatgttggtaagataaagatttgactacctgtataattttatattgattaggtttgataggcttaagtttataaatttaggtattttttgttgtcacggttttatataagggattttttttagttctaggggacaatccctaccataaaggagtttataatcagggcactttttcaaatattcctgttataactcaaaataaaattacaatgaaatacattagtattcttaatattcatagaatacaaactctgaaagtaagattagaaatatttcttacttatgatgaaataaccttgttattaccattttagttactttatgatgaaataaccttgttattgccattcaagttacatcataacttaaattcttgggtagaatgtcttttcagagtgctccaagtaaagactatttgaattatctatgcaagtacctactaatatttaaacttttgatgatcttttcacataatggaggacaacgggttctatagataaacacccacatcagtggtccaccattcctcttccagggttatatttcattgtgttctgattttaaagcaaattagggagtctgtttttgccaattttcccatgttgctgtggttctgagtgctgtgattatcaagacgatagaagtggaaggcgggagtggaggtggcttctacagtcttcagtgcagcatccactacagagttaatggcatttttacgaagaccaggtgtattttgtacttttttttttggtacacgtttctcaaactatgttaaaattaaccatcaatatcaaagtatactgtcaagaaaaaaagaaatgcttatgatgaatattcatagctgttagtatctttggaaaaggtgggtaatcatttttaaaaatagagtaattttctttggaatacataactctcaagaacattttgatagctatatacatctaagaaaagtgtattccatttattattctgttaattaaatatttgttgatcattactgtgcatgaaacattctctcggatggaggtaagtggagctcctccttgttaaggagaatagtagggagatgtgacggctgcacaaatgactacatttccaagcaggataaaataccctgctctgggggaccaggagaaggggaaatcacttctaatggaagttgatgatagaaagaatttgtgaaaggcttttgcatgatattttaaatttgataaaaagataagatggaagggcatgtgcaaagtcacaaagagggagaaaacagaaaatgctttccatgaataatgagttaacctgggttgttaaaaatgtatggaaatactgtgtaggcatgacagatgaaatccaaaggatttgtttccagtccatcattagcaccactaaaataatagaaattatttttaaaaagcatacatctaaaatagcatgagaataactacgagagcaacaaagtgttggatgcggtaaagcttccaggggtgtaactgaggcaataatcaaagaaacctgaaaatcgatgtgcaataaagggttacaagatatttaaagaaagcctctaacacaaagagaaagaccaaagcaaacaaaagttttaaaaatccttgcaaagagtaaaataaaatttgggaaacaattttcttggagaaataaggaaaaagaaattatccttaaagcaggaaaaggaggttagaacacattttgaaaagtcaataggagggagagtcctaagagacaacaatgaaaaggcccacagggctcaccttaccctgacccatgaattccaagtattgagagaccatggaggcatttgagcaagtggtgaatgatgaggagttttgtcttaggatcattaacctggcagcaatacaaagagtaggctagagaaaagaggcagagagctaggacaaaagttactaaggaaaggaaccaggggtataaattccaaaagaggtggcaggaatagaggacagatttagtttttacagaggaaagaatatgagggaatgaaaaagaattggatatgtagacagaagaagtacagggaattaaagtgttgagagttaataagactcaaacttcagttttaagcctttgcatttgagatattggtggaattgcagatagaaattattatcaagtattatagagactattggtttctaaagactgagagatgaagaatggatttagaatcacggaggtcaatggtgatcttgcagggaacagtgtggctggtatggtaggggtgaaagcctactggaataggtttaagaggctttgcaaagagaaactagagataataggaatactacttgcaaggaatggtgccacagaaggttgatagctggctgagaatgagttcaagagcagactttattaagaaagaggggagaatttctatcttatttgtgttttccagttgggcagcagagaatatcctaatattagaaaattttacaaaattctgtcatggttttcataaatgattatagcttgcttttcaaaatgcacaaactgattgcaatacaaaataagtagcacgaatactttaaaaatagatgtagatattaataatactagataatttctggttagtatttacatcatggaagaaaatataaatttagatatttggtatttttacagcttgtcatttttttttttttttttttttttttttttttgagacggagtctcgctctgtcgcccaggccggactgcggactgcagtggcgcaatctcggctcactgcaagctccgcttcccgggttcacgccattctcctgcctcagcctcccgagtagctgggactacaggcgcccgccaccgcgcccggctaatttttttgtatttttagtagagacggggtttcaccttgttagccaggatggtctcgatctcctgacctcatgatccacccgcctcggcctcccaaagtgtcattttttttaattaaatagaaaccttattttaggtctttacaggaatcagcatataaatgtaaagacaaatcctggcttcttgctggaaaatcctttaagaaacataattttcatggcatcttgtggtcttaatccaggtaaagctctgcttttaaaaaaatgaacaaaaaatataaactgcaccaaaattcaatattttgttactttgctgtctccatctttaagtgctcaattttattcataaaacaattgaagtaatttaatttcaaaccatttgggttttgtcatatttactcccacattacatgcacgtggtagatatggatggaaagcttttgacgaatggtatttttttcaattgactgactaaatctagaaacaagatctcctactgccccagtgccagatgggcccaccccactctctccgactctgaagtgatcaaatgctgtatgcaggaagctgtacagctttgccaattaatagctgcagactcaattatgaacaaaagggcagccagcctttagtagggaaaatcaacttagtagggaaaatcaaaatgtttagccaaaaagcatttaattgtgtttctttaataatgaagtcccctttagatatgttcataaatcaggaatagttaacaggaaaaatgatagatatgtttgtaatgctacgtagttatggaattgctttcccatagatcttttctgattgatcattatgttgggaattttttgcatgtgtgatagtcaaataatggtatgggagaaaagtcaggatattctattaacaagataatcattttatcctattcttgtgtttacatcttctctgttgccatttaattccccacttcaaggctgtttcattgtctccatctctactgtatttagttaggcttttttattcttaatgtttttttctagctttcttgtagtctgtgattagaaacacataaaatttatctgattagttagtgggaattaatcactcttctactactgaagcaccctgctttgttgtattcttttattattccagacatcagaatgtaatattttaattctatatgaccatctgccctacccgactagaaatccctgaagactggagctgcctctcacctatctttgttttgctggtagtcagtgagcacggtgctctgcatataacaggactcagggtttacccaacgatggcctcagtgtttatgttccccatcacaatcctaacccccaaggcaatgatattaaaaggtgcggccttggagaggtgatgaggtcatgagtatggaggcctcatgaatagcattagtgctcttctaaaagaggccccagagaatttgttctccccttccaccatgtggggacccagtgagaaggtataacatatgaaccagaaagtggacccgcagcagacaccaagtctgctggtgcctaaatcttggacttcttagcttctgaaacgatgagaaataaatttctattgtttaagtgacccagtttatagtattttgttatgacagcctaaacagattaagaccctaatcaagagtctacatttgacctctgtgcttacctgttactagtaatcaaaacattttagactttgacaaagataattgcgtaagtgttagaggtatatacttatccattgttaattttaatcaattttacataatacaaatgcattattacatatgcttttcacagaacttaaatgccctttgataactatgtacttgagtcataagtaattatgtaatttgtctgaaatgcttataataaatagcataagagagatttaaccataaaatgtaacatttatttacatatctatttttcaaattatgtgcacatccaattttgatatgtgtaatgttttctagtgtctatcatggttcagtgatgttttatcttcacttctgaatcattttgaagcagattctgtatatcagcttcttttccttgcctattgaactttctgccatgtagttagtcttagctaacacttacgtattttaacatttaaaaaatccttagaaatcaccttgtccacccattttcattttaaacgatgaggaaacaggtacagagaagttatagggcttatataaagttagtataagtttgtcttatgataactctaagctcaaaggtagatataggttttgtggggcttgaagctgatataacttgggaagccctttttaagaaagggaatataaaattaggtgagaaacttaatattgactaagaatgagaaaaaaaataagagcctggcagataccacaaataaaatccatccagaaaataacactgttacattgtccccgacatctttgcaatatttttctctgtatttattagctacatattccttggtctttacttcgtgacagcaattacataatgtcattttctgtggaaaacaaagacagatgatcagattctcctgtagcattgtcaatggaaacttgctttttactattgacagttaagtttctttcagcttcacaacttattattgctgttgccacatcttcgactcccatctgcctgtcctcattcaggtcacacaagccctggagcaacctgctccctggttgttttccagcaaacaagactccagaccctcactgtcaacaatgagctggctataaacctgggtctttgtgctcctcaaagcagggagcagagcagcaaccccctcagatccttctctgggattaaagatagcgtccagattctgaggcacaagccaacaggggatagtgctggccgcccattctcctgccctgggcctcaacatcagaattgaaaggtgacccaggctccaacctgctagcaggtggctgatactgggtctcctgagaagagcatttggtaggagcccatacaagtgaggggcttggagcttaagcttggttaatttcatagtcagtctgcttctgcctatggcaaatccttgcaaaaggccagacactgtttttctctttactaagaatttacagtattgtaactgacccgctaagtactcaggtaaaaatatttgtgattctcctgtgtctccctaagccacatctctctctgggtttttaataagctagcattaaaaggcataagaatgatacgttggactttggggaaagggtggcagggggatgagggataaaagactacacattgggtacagtgcacactgctcaggtgctgggtgcacctgaatctccgaaatcaccactaaagaacttattcatgtaaccaaacaccacctgctccctaaaaacctattgaaataaaaaataaagttgaaaaatagctagcattaaatcaaccaactatttctctgggtgaatgttctgtcgcacacttgcacaaaccctgatctctcttcaggggcctcttcaaaagttcagtatcagactcacttggctccctcgtgccggctgtgtgacgttgtttttctccacttcgggacatgcagttggccatgtgctcacaggcctctgctgtgttccctgtggcaccttcgcagactgagtggcttggcatttggctgatgtaggccatgtgggcacacactcagcttattgataacatccctcagacactgccatttccaacattttcattccggatttcagaattcccatcacaccatcccaaattctactaagtgtcagaccaggccatgctaccctgtcctttcagggcttacagagactttggtgagatgttggatttggtcatggtgctatttattgttattattaattattagttttttaatcacagcctcctatcctcaagttctaggtaaaattgccaaagtagactcctttgagttttgggatttttttaatttggtgcctgtgatttcataaggaaatattttattttatacttttactgtagagatgcatttaaagtttaatattaacatattctggagcatcttaaggaagacagccttataactgaatcctgccatatggttcaaatgcagctgatttgaacaacatttactgcacttgctttgaactaataaaagaaaaaacctccctaccttctttctttccttccttcccaccctccttccttctttccttccttctttcattccttccttccatctcctttctcccaaaacatatttgtagtgaacacatcctttgggccaaacactgttttggcccgtaagtatgtagttgtgagctaaccgacactattcaggcctcacagagcacacagtctgaatgtgtaaaatacgcatttgcaacaactgcaggtgaatagtgtcatcgtttgccatatgaatgaaggtttttcggtgttttggggggaggaaacaggtgtgagaattgcacgatgcacggtggcagagcagcgctgaggctaaaggaaaagtgagtcagcacggtgattgtggcgttggttctgactcagtggcagtggagcagcttctgccccatcaaaagagtattatgtgatgggaagggggctttgtgctttttcctgttttaaatacaagatctgggaatttgatttgttcctgtggttgtataagtgctataagcgtaagaggtattgccttgtttttatatggtttgtttatttttatttatttaacaaacacgtttaaagcacatataacctgtcaggggctatactaggtgttttacaaatttcagctcattttatttacacatattttaggtaaaagcaaccaatacaaacttagaggttgcggagaatatatatatgtatatattttttacctttatgtactcactcaagtttaaaataccttgttgaagatgaagtccctggtgaaaatgtagagactcagggaaatctaagtggcaaatattcaaatgcattaactttccccaacaaaaagcatttccttgcctcagtctctgaaccaagactcttgatttccttctggagaagctccttagttcctaatacagaccggcaggtggagcagcacgccctgaaccctccagcaagcctgggcctgtgtggcgctcagagcgagcctagcggggttgacccctgaggttccaacactactttatttttatttatcaacttttattttaagttctggggtacatgcgcaggatgtgcaggtttgtttcataggtaaacgtgtgccatggcggtttgctgcacagatggatccatcccctaggtattaagttcagcacccattagcggttcttcctgatgcgttccctccctctgctccactgacaggcccaattgtatgttgttcccccaccccatgtgtccatgtgttctcatcattcggctccgacttataagcaagaacacgcggtgtttggttttctgttcctgcgttagtttgttaaggataccaacttccagctccatccgtttccctgcaaaggacatactctcattcctttttatagctgcatagtattccacggtgtatatgtaccacattttctttatccagtctgtcgtcaacgagcattcgggttgatttcatgtctttgctattgccaacactatattttaaaagaaaatatttctacttcttgaagggcatgggccttatctacagtgctgggttgacctggttacaagaaatccacagaaaacataatctgatatttactcccattacaatatggtacacctgtcatacttcagcaagcaaactgtaaagggagagaaaattcacttttatttgaactgctctttactcctctgaggcttccctggtttgtggcaaacaaacattgtaacagcttcacctagaattcaaaattttaaaccatctaacaatgttataacagatgagtcttggagcttggaggccagggaaaagatagtcatgagcaaaaccagtcttccttctcttagaataagtattgagagtatttatttgtgcatgtcaattcaataatgaatacgaatgtgacctcgaaatagtatgtagtccatttctaatcaagatggaacagcagttcttctgacctgaaacaactttagacaagacgtatgaaacaatgacactcaagccattaaacatcaggcaatgaaggacagtaatcctcaagagatgggaaacagatgaggtgagacctacaattgcctcaacttactgcctgggaaaagttttcagagggtggaagcctagctgtctccttgagttcagaagatgaagcttagaattcaaggaagttaagtcggctagaattcacaggacagtatgacacaggaatgagatgtacaaagagaactcaagatctgcagagggtccccctcagtgcatgtgtgtgaggaaactaacagaggcaggggaaagaagcacctaaaatagtaaggtggaacaggggtcaaggctcaacaaagtaagaaatagttccttttcccaatagccagagtggaaaacttaatatttcaaggggcattgagtagagttctaaaaaggatcctcccacactaagagggaaaaatgaaccttggtaaaaatgctaatttaggaccacctaacaaagcttaaaggcaagactttaatatttgggctcacattaatcccaaatattctaaataagttaaccatgttccagagaaatttcaaaaatatttatagctataaattaaccatgatccaaagaaatttcaaaaatatttatagctatactaaaattcttagcctgtaaaaagtaatatccaaaatgtctggcaaccaattaaaaattatcagacatacaaagaaggaaataaatacagcctaaaataaagagaaaaatcaatatattgaaactgacccagaatttacagataatagaaataggacattaaaatagttcttatgactatacttcatatattcaaggagctagaagatacatcttacattttaatagagacatagaaaatataaaaagatccaaatcaatttttagagttgggaactacaatatctaagatgaaaagcacactggatgggatcaaaggcacgttagatattgcagaagaaaagatttgtgaacttgagaacagccatagaaaatatccaaaaggaagcagatagaaaaaaaattaagaaaaaaagaacattttttcagcagtgagacaactagaattgacctaatatacatgtaattcaagtcactgaatgagagaggagtgggagataaaataattgaaaagataatgaccaaaaaatgtccaaagttggtaaaaactatgaacccacagatctaagaagctcagtaaaacgcaaacacaagaaagatgaagaaaatgacaccaaggcccattataatccaattgcttaaaataagtaataaggagaacatcttaacagacatagaaaaaatgacacaatgtaaataaaggaaagatgaaacctatgacaccttgggaaagaaatgcaggctaaaagactgtggaagagcatctttaaagtatgcaaaaaattatgaacctataattctttattctgaagaaatatttttttaaatcaaggtgaaataacaagttgttttcagatatacataagtcaaaacaaattctcaccagcaggcattcactaaagaaatgttaaaagaagtccctccagcagaaggaaaatggaaatagaagaaaccctgtgtctacacagaggaaagaagggaccagaaatggaaactataagagtaaacatactttatttttcttattattttaatatccaatattttctgattatttaagtctttaaaattaatctactgtttagataaaaattacaatgtaataaggttcataacatacgtaggattaaaatctatgactacactagcataaaggcctgaaggaaaaaaaaagtatattgttgtaaggtttttatatgtgtgtgtgaggtatagtatactatcacttgaaagtagacagtgataagtttaaaatgtttactctaaaccctaagtgaaccgcgaaaataaccataaataattatagctagtaagccaaaaaaggatataaaacacaataataaaaaattcttgagtaatccaaaggaaggcaagaaaaggagagaaaaggaacaaagaacaaatgaaacaaaaacaaaaaaaagcaatatgtatatttaaacccaataatattaataattatattaaatgtaaatggtttaaaaacaccaatgaaaaggaagcaattgctagattgaatttaaaagcaagacctaactgtattctgcctacaagaaacccacatcaactataaaggcgcatacaggttaaaatttacatggaaaaagataaaatatgtgaacactaatcaaaagacaactgcgatagctaatgagtatcaaacagtggatttcagaacagagaatattgctaggaatgaaaaggatcattacatcggaataaaggaatcagtttatcaagaagatgtaacaattctaaatactaagcagaaactgacacaatttcatggggaaatatataaatccacaatgatagagatttcaacacctattcctcaagaacagatggaacaagtagatagaaacttagtaaggatgtaggcaattattataacaaacattttttattacaaaagatgtgaaatatttttggaattgaacaattttatctgagttacattttatttaaatgagacataaataaggccacattgtagagagcaaaatttaagagtgtgaattagtcagctattagtttaggaaattcaaattttagatgattttttctttttaaaacatagcactttctctagaagtcaatttttaaacatcaaatgctttattacaaagttaaaataattatagaaatgattaatttaactgtcactctttacatacttctctggtttatttacattatttggttggggaactttgctgagttacctaaaggagatttcagagaaaatttgttatggaaaaatggaccatattaacttaattcagagtttcctatcccaaagtttgcataaatcaagaaattacttagtcaaaagcttttatggaagcaaagttttaggaaaaatattttaaatattaactttaatggtaatactaagagattttaaatattctaacataattcttacaacttggtgagaataggattattatctcaattttatagttgaggaaactgaaactcgtatgttttaacaacctgtcagaagtcacacaaagcagcagaaaaagttcttctaaatctatgtccacttttttctccactaacttcatgataaaaataacacaaaacaaaaatcacttaaattaacatccagaaataaccgctcatcctttttttgtgattgatgaaatattgccttaatttgataacatgaaatgaatatgtagagggtaaaaggaaggaatgtgtattttgcttagaaactataggtaaatagatatttgcatatttttaatagaaaatatatttgtttaaagtaaaagtgaggacatttgagctaatctaattcacaattctaaaatagcaccatctcactacaataaaatacattcaagtgttagttaaccattgactgaaaaaatgaatgatatttttagactacacaaaaatgtactaaacattttttaagcattcttactcattctcttcctcctttctttctcctctccacatatgcatatatatgctactggcaaaatgaaattataactgctgtttttcatttatcattatgtattggcacctctttctctgctaataattagtttacattataattttttagtgatgttttgaaatctatatttaagggcataatttatttaaccaaatctctatgtggaaagcatttaatagttttcctctattttaaaatatgctatgataattattcttgtacttacatctctgcagactttctaattatctcattagtataaattcctggaagtataattgttggatcaaggggtattaacattataaattttgagacctattgttaaacttccctctaaaagtattgtacttgatttggagtccctctaacagcatataagtgtatttcttttatattcttgtcaacagttgatattatcaatgcatttttgtcaactggttaacagaaaacttcatctccttgcttttgtgtatattgaacataaggatactatcttttcatataccttgttgccatttttaatacattttactcttatgaattggaaacaattggtcacatttctcaaatattttattagttttcttataatcatattgactttacagattaattaggagaaaattacaaatttagaatattgagtcttccctaagaacaagatgaaatcttgtggaaccagaaatttttatttcttcaagtaatcctttatgtccttcagtagagctttattattttctttgtttaacaatgtgacaggaacttaccaaacctcttttctttttgaatagttttctatcttcccctgtagttaattaagcatggccatttaactaagtcctagctagtgaacaccagtttcagtccttgttctaatacccccagcccatggtcatcttatcttaatttctcgatctcccttgtctgcgtggaaaggactgtgaggacctagaggaagatagagctgcaagatggaaagatgacattcaaggctatgcagcaagaaagaacatcagtgtgggactttgtgtgatccaaaaataagcttgtactattttcagacactgaaggttttttttgtttgttgtttgtttgttttattgttgtttgtcatagcaaattctgtttttctaagacagaaatgcaggagttggttctaagagtggtgtgatataaaaatctgaagcaactggtcagtagggctatgagaaaacagatacagaagactgagaagctgaaaaatattgatattctatgaaataaacatttttaaatgtcaactgtgacaattcggaaggcagactcagtgctcactgagactgtggctctagagcaatacttgaaaaggctcagaatgatagtgtatgtttgctactcttggtgctttcagcaagacattacaagaaagaggtgagatcggataagaattggttagttttcaagcacagaaaaatgggaatggagatgtttcagtgatcaaaatccttacaggtttggaaaatccaactgcttctgaactcaaatagcattagtaacaagtaaatgtgcttgagaaagttcttagctacaaaggcccaatgaaacttctcattgggaaaacagactcatccctgcagcctaaagcagattttatatatatggctttcccagctaattttttttcagttagctttagggtaggcacaattacattgacaaagaaagagagaatgagggaggcagagagagagagagagagagagagagagagagagggagagaaaggcaggtgcatgagggcaaggaagcaatgaaacaaaccaatttgagaaggaaatcaatttaggtgtggttattaggacataaaactgcacagaaagaaatagataagtctgcaatattttggggttatcatattgccaaagaaaccatgagttaagactaaaaaagccttcccttaatttcctatacaaacccttggatctttaaacttgcaaagcaagaagcgaactgtgaaaatggtacaactcccaagggcctgcacacccagttctgatggaatacacccaagatcagtggtctgcaacctatttggtgccggggactggtttcatggaagacagtttttgcacagacggccagggggtgaaggggtgcgggggttgggggaggatggcttcaggatgaaaccgttctacctttgatcatcaggcattagttagattctcataagagcatgcaagctagatcccttgcatgtgcagtttacaatgggctgtgcgttcctaagagaatctaatgctaccactgatctaacaggaggcggagctcaggcggtaatgctggcttgcccactgctcacctgctatgcggcccagttcctagcaggccacggaccactagcggtgagcagcccagggattggggacccctaccatgtaggataacaaacaagtaagagactgcttgagggcagggccaggacccgtggaggacagtgcacaaggctgccccctccagagagctgcattaggtcctaagcaaggaatttctcccatcacaacagagtaattgcgcaaggtcttcctggcagggcctgccatatctctagtttttcctttcctaaagggaagtgtttgttgtggttaccttgtcctgttccaccatagtgtgttgacacacagaggggcagataaggtgcccactgaattcctgtgtcaccagagcatatctgaactaatgaagaggattgattacagatggctcagagagagcctcagctttgaggtataaacagtgcctgggtgggattgtgggtcttctgtgaagactgactataatctacatgtaaaaagaggagtaaaatggagatttggttaagagattggtggactctagcagagactaattactcttaacgaaacccgttttctcctattcctgaatacacagctagactacatttcccagcctcccttacagttagatatatctattttattcagttgtagccaatagaacatgtgtggaattaatgtatgctattcgtggtgtggttcataaaagccttatatgggcaaccatctattatctcattcccataagttaacttcatggagagaacgcctaggacctagagaagggtagagccatagtgtagaggaggctggttcccagaatgcccaagtagaaggcagaaaggtctgctttggacttcaatcagaagaaacacaatcttaacgagtttagcctaatgaaagttgactggggcttttgattgtttgaatagcaagtggtttttttttttacagtaatacaatttttattatgttgttaaatctcttcctctcactttttaatgttttgaaggttgttattgtgaattgttcaagaatccaggatgaatagagtcataaattttttcagttgtattggatcacttaggctgaacttagacttcatttacaaaatcaaatgcactgttaatgcaaagtaaatctaatatagcgcacgataaactatatattgatcaaaatttccaaataacattttaaattatacgaaagagtagcagttttgccagtagaaatactgaaatttctgccatgagtaatagtttatactaggaagaaaaataaatatgtgatctgccctcagcttttgcatgatagcagagaagtgattgatattaggttattcatttatgggtagctcctctgtgctttatttctcaccctgtcagactgagaagagctaccaattttattaggactgctgatgtactctgtacttatagttttattacctattggagaagctacaaaatattggcactctttaacaatgagccttttatgcttccttgtgtcagcaagtattttagattaataccctatgtttgattgatggaattgtactgagctcttttttaaggttctaatttctccaaacatgtaaaaaaactagcagggggtctcacatatatgtgtaggcatatatatatacacacacatatacacacatgataactctattatgtatatagttatatatgtatatggtatatatatgtatatggctattgtgtgtgtatatgtgtgtgtgtgtgtttgtgtatatatatatggttattgtgtgtgtgtgtgtgtgtgtgtgtatatatatatatatatatatatatatatatatatatatggttgtcctctctcttttgctaggcagacatatgtctgaagctgatattatatatttgtctattattataaataaccaacataatggtatccatgttattaggtttgcaaaatattttttgaacagaaaacaccaatttagaaggaatacaaacttatattctgaagttcaagtggggagacataagaatgcctgtcctctaatttttttttgaaaaattattaaagctagtccaatgccagtgttggactagtaacctggattttttaaattaatagactttattttttagagcagtttcaggttcacagcaaaattgggcaacaaaaggtacagggagttcccgtgtgctccctgcaccagtgtggtacgtttgttacaactgatgaacctgcactgacacatcattgtccaccatgttcatagtttacattgggtcattcttgaatagtctgagttttgacagataaataacgacattttccaccattacgtatcatacagagttttttgagtgccataaaatacttccgtgaccccctatttatttctccctcctctgaatccccagcaaccactatctttttactgtatccatagttttttcttttccagaatgtcatgcagttggaatcatacagtttgtagcctttgaagatgagcatctttcagctagtcatatgcatttaagatctctccatgtcttttcatggcttgatagctcatttgttttttagtgctgaataatattccattatttggatataccacagtttatttatccattcacccactgaaggacatcttggttccttccaagttttgggaattatgaatgaagatgtaaacatctgtgtgcagattttcatgtggacataagtttttaattcatttgggcaaattccaaggagtgtgattgctggatgatagggaacagtatgtttagttttgtaagaaacttgcaaactgtcttccaaagtgatggcaccatttgtcattcttaccagcagtgtatgagagttcctgttgctccatatcttctccagcatttgtggttgttagtgttctgaattttggctattttaatagatgtgtcatgatacctcattttttaaattggcatttctttatggcatataatgcggagcatctttttgtatgtttacctgccatctttatatctttgggaggtctcttttcaggtcttttgaccatttcaaaataaggttgttcattttcttattttgagtttgaagagttgtttttatattagaataacaggcttttattatgtgtatcatttgtaaatattttcttccagtccgtggcttgtcttctcattctcttgaagaagaaaagcttccctgattggaaattgaactcaggccacagccatgaaaataataaatcctaaccactagaccagggagtgcatgctctagatttttaaaatcttgtaataagaatattaaaggattaattaaagtaaatatttggtcttttattttgttgtaaaactaaagatatgtcaattatctccaagagatctaaaagaatggaaaatatgtttcttccctgttttgatcattgagtgaggaggcaactaactgactcttaaaagcttggaacaattttcagaataattgaaccttggcagagctttgctataatcatttttaataatatttctatcaaacagttgtgagtccctataatgctaggtaacaaagttttgttgaaatatataaatttcttttatttagtttttgtagcataaccatattggtacatcaagtatttgaacatgcttacttttatagggaactaacaactcatcttctaaggcaaaaatcaaagaaggttactataaaaatccacaatcatgttaactttcaaagtcttagtttcactaaggatcattttttctttacagagatgaaaaggagtgcttactatttcaattaactcttggtttcttcatattatatttagctatttgagattaaatagattcatttaggtatcatggattaatttacatatatgactttaattatctttcaatatattatcaggtattgatttagactgttttcataagtcttttggtcttcctcaatagaaactgatttcctgtggatttacatgattgccctctaaataaccagggtgagataactgtgccaaaatgattggctggagagagtataagttcatttagaccacttttaaaaatatcaaagtattgtagtagatctctgttgtactttagcatgatttgaatcatgtcgtccaggtctgcatatctacctgcatatggagtaacacctgatcataaaatcacatttagcactattggtttaccatttccaagtactgattttagaactagatctcaaatagtaggcaatttttgtgttgtatctgtggggagagagagtctgctttcacatgactttctaaaagtagcaaattatatctaaatgatgtttaagtgttttaaaatgtaaacacttagattttaaatctaaaaacacttattggaaaaaaatctttatttcccttgcataatgttggcatgaatgcagcgtggctggattggcagttctgttactgcaggaagtggatttaaaaatgtataatttcaaagccaaataattcaggcaggcatgctcataggatggataggttcagtggatacatttgctctccccgcactcaccccactcaccccaccaaccctgactcctcctttgttttgtgctttgtctttcttttctgtagattgggatccaggttcaaaaatcttagcatagtttacccttctgtagtccaattttaaatactctaatggagtgttctattgttttgtagcaagtcaaatagttttctccatatatatatatatattgcttagccattccatacatagttaattcttttaatcttacctcataaatcaatatttctaggtcattaatcacccgtactgccctttacacatcttactgtatatatcccttttcccaatcccttgtaaacctgattttccctctgcacaaaatttattatataatcctaagtaggctgaagatataaatttctttttggaagaagagtgctttaacattaaaacgtctctaagactggtcttatctagatctgcgttgatcccgctatgtatcaaaggacaacctaaagccggaagataactgaataagtcttttaacttacttgccacttctaaaatattgagttacatttgaccagatagctccaataaagggacaagatttattgcttaggaaacttcaaccctgtattattgtgctttgtttagcagatttttctaaaggagaaacatatgtatttaaagaggtagaattttttattattgtaaatgaacaaaagatatttctagccagttgtgtctcctagaatgtactgtagttaggtagaattaggatgttgctttcaatttatgtatgtgatgcttatagtttcacacaactcaaggtatgtcttaaagtgagtgtgacatatagagagagaagcagcctccctattacatagatacttaacttagattgtatatgtgcttgcaaggattggaagccaagctgaaaatgggggtttttgtgggtatatttgctctcttttccccactctgactcctagtttgtttgtttgttttttttttttttgctttgcgctaactttcctttttctgtagattgggttccaggttcaaaatcttagtgtcacctttgattctcctttccttctctaccccataggtaattttaaaatatgtcagaacaatggcttcttttatctgctattttcttgttatttcaaacaatgtatttatagattgcctgatccttctaaagtgaaaactgcaggagagtaggattcctatttgccttgttcactcctaaatgcctggaacttagaacagcaagtgctcggtaaatatgtgtgtaatgaattaatgaatgtcacttgtcttagtcttccctttccatttgtactagctccacgtgggcgcttttgcttcatatctagattatttaaaatatatagcatcccatcaatttgaatttcaccattcagtacttactgcattctagaaggaggatggggaatgcagaaggtaatgtgtagttttaaacagggcagtcatggaacgctttagaagggacaagttctaatgacacctgggggtcaatcccagcaggacacagaagcaagcgtacatcctctcctgcaggaggctcctgtgtgatgtttcacatgctgacgggtgtgtagatgtggtggtagcagccttccgaagtcccctttatgttatttctattcaatgactaggagcaagaacattagctgtgaatgaggctggagaagaggtgttggaggtttgaggagagaatgaaatatataaaatagccatctgtgtgcatggccaattgaatggagtagagaagtgtggtgaaatcgcttgttctgcaccagctacattgggctgctgaggcctcagcatacggttgacagagagcttgatctaggcagcatctgcaaagcacagcaaactaagggtgggttaagggagttcagggtgagtgcaagggagagattgtaccgactgaccatgactttaaactgggtcaggcaggagggcagaaataggagtaaggggcagggaagagaagggaaataattggattttcaggattttatagcgaaagtttcagggttagggttgcagagggattgagctagaaagataagaaatggtagtcttagagtgggatatatgaagtctggaattttggagtggctgcaattatttgtcagaaacctggctggccaggatgcaggtcaagaccgtgatagaacaggccaaggaactagagaggctgaagcactggtccaactatctacacaggccctgaaatgggatagaacagtctgaaagaggaggcagacacttcgtctctagtcccagtgttataaaatggattttagagagaaaacaaccaacactgctggggagacagcatccttagggaaaagtcaggcttctgttagagcaagaagaggtgaaaaaggcaatctgagacagggaagggtatgcaaaagaggttttcctgatgaccgactgtgagcagcaggggcacagtgcaatggttttagcagttgatgaggtggcagagatgatttcagaaaaggagatgtgtagagccattcaggagccagaatgcaaaatgagaggtgacctagtgtttacactttattgggactaaagggcatggtgagtttggtctggagagtgctgaggtattggttggccatgagtataggaggaacagtaggctggggctcagctggaccttgagtcctgcaatagagggagggcagtccaagggcaggtgattttcctcctggcacgagagctcccttaagacacttttccactggtaaatttgtagtttattcatttcaccaccattttacagtccattttcaaaaaatgctgtgagtattcactcattctacttattcaggattgttgtgttgttgttcttttttgttgtcttttacaaatactgctgccatgaacattctcataaacataagtatagtttcttattgagaaagacaataatcatggataagggattctctagggaacatgcctaggaatgcaatcgcttggccacagaatatgtacatttttattttatttttatttttcagaagtaaagagtaaaaacattgaatgatctcatataacaaagtatctggaggaaacagctccttgatttcttcagggacccatatcttttgcatctttctgctgtagcatccttggaatattgtcttgttgcttcatggttggaacatggtgcccattgttctaggcatcctttcaccatctatctggacaagaagaaggaagaaaggaattgacatgtgcatctgcatttagcaggcatcattagtataaagctgtttgacaaatattaattgaaccatcatttgggtggcaatgtgtcaggctatggaatttaataattagtcaaaaatgtacaatttggactctttagcaaatcttacaggtccaaatacaagacttcttcctagaaatttattttacatgtctgattacgcagagaagggtcattccccaactccagcacactcttaacaattcttgtgttctgactctgaggagggaaaggatcaggaaaaataactaatggatactgggcttaatacctgggtgatgaaagaatctatacaacagactcccatgacacaagtttacctatgtaacaaacctgcacatgtacccttgaacttaaaataaaagttaaatttaaaaagtatgcatttttatatatgcagctttactaggcaatggtaaatggtttccaaagtgtatccatttacactcaaactagcaggaatgagacttcccatccctccatatcctcaccaacacttcacagtaccagaatttttttgtcatctagtaacataaagatgttttattagtgttctatttgcacccctgtgattattaatgaaattgagcatttttaatttgttttattggctattcagttatactcttctgttgttactatatatttcctgcttttctgtggggttgtgtttctttttcttgttgatctgttggagtactaatatgttttgaatactaatttttattgattatgcttgtatatatctatttggagtttatggcttaccttttaattttttaaatggcatctcttgatgagcaatcattgttaatgtggacaaatttatcaatttttatactttatggtgtgtccttttagctatctttcttaagaaatcgttgtctatcccaaaataataaagatttttttctgcatttttgttaattttcatatggtttggcctccaatatttcttttaatcacacagaattgaatttcatatatggtgtgagacagagatacagtttttctttttgcatgaatatgcagttgtcccgcaccatatatcgaaaactaccttccccattcatcagcaatgtcacctttcccatatgatcaagtttatgcaatcactcaagaaatatttattgaacacctgttctgtaccatgtactattaatctaacaaggaacaaaacaaacaatgattcctcatggagcttataattcagctcaggtaggaaggtaataaacaataagcattacagatgcattctatggtacattagaaaggaatgaatactatggaaaaaagagaaagtgaatgaatactatgaatattgtggaaaaaaagatctggataagggggtttggagttcttggtggggagaccgttattttaaatggggtggttgtggtaggtcgcattaagaaagggagaccgagacacttaaaagagatgaggtaatgaaacagacatctggaagaacactccaggcagacacaacacctagagcaagttccctccactgggaatttgcctgatatgttcaagggaagccagtgtggttagtgcagagtaaactgtggtgaaaatagatgaggagatcagagaagaggggtggggggcagagtaggtaaggctgtgctggccgctgtatgactctttttaggacacttattctttcttttttcttttcattgactatatgcgcctgttggaactaattctgttgtaaattgaaagacattgatccaattttattctacctggatggctaaccagatgtcccaacaccagttaatgaatcgtccatgtttccccactgatttgaggtctaactttgtgatttattgaatatgcaaaattatttgaactataactagatccctgctccagtgaccttatgttatacctgtacacactgattttttttttggagatttcctgactaattttttaaaataattcagtgtaaactacagaatcatcttctcaatttctaaaaagaaaaacctagttgtatttttattgcgatagtattatgtttataaattaattttgcaaaattaaccattttgtgatgtgtaatgatgtgcaatccttctatcacaaaatagtgtgttttctaatttttaagtcttgtttatactttaaatcatatttcaaaacttcttcaaatagatcttgtacatttattacatttttcccatgtactttattttttgttactataattgagtctcttatcaatatctcctaattgatcagcacttttgtatatgaaaactatagatttttgcatgttaattttgcatgctagtaccttactaagtttctatgttacttaccaattttcaggtggttttctctgagtaaatgatcatgtaatcttcaaagacttactgttttatctcatcattccccaatgttttaacctcattttttttctcttacctaattgtactggctagtgcctccaataagaatatttttaaaatgttaaatagtacagcaatagaggacatccatatcttcttcttgcctttagtagaagtgtgttgtattttcccgcatggttctgagattggagctttacatttgactttcttggtagatttttctttatttcttcattttcaatctctctgggtcactttgtttttagcacagacgtgtttttctttatgatcaaaactgaaagtttatttagtctttttatatttattaatagctgagatgttggtccaggttctgtgaaattattttgtaatgttttctatttttatctttctctgtgtgctcagttttctttgttcatgtgtatttgaaagagtatgtacactgtttattttgtttttatggttatctttataacggtatatcacctatagcccttattttttatgatagctattaattccctaatatgactaatgaacataattaatatactttctcttcttccctttctacagtaccacctgattttagtcaataatatcatatttcatagtgcttacctttgtctggttaaatatagttccatgctctaaatcctgtcctttgcctcccaatgataatagatgaagcaaaaaaaaaaaggatacctcacatgtttttctcatctctctctcgatttgtgttagttgtgtcatctgcatatgatatgtgttattgacattctgtactatcatcctgaagccaatgctaaatgatgagttgtgtagttatttatgtgaatgcttgacacagtcctttcaaagacattgccccagtcctttcctgagagtctcaagcttgtctccaaagagtttcctcaagagtggttcatagcaacaattatctttgaacttttgaatttcaaaaactatttatctggctgggcacagtggctcacgcctgtaatcccagcactttgggaagccaaggcaggcagatcaactgaggtcaggagttcgagaccagactggccaacatggcgaccccccgtctctactaaaaatacaaaaattaaccaggtgtggcacatgcctgtaatcccagctactggggaggctgaggcaggaggatcacttgaaccctaagaggcagaggttacagtgagccgagatcattccactgcactgggtgacagagcaagactccatctcaaaaaccaaaccaaacaaaaaaaacaacaacaacagaaaaaaacctatttatctgtagattttatacctaaagggcacttttcctggaaatatataccttggcaaaccttttcttatgaatcttgcaggtgcttatctattgtcttctgggatgagacattgaactggaaacacgaagtcaacctgactcttacaagtgacttgatagttttaaataactacacaaaagacttttaaataaatttttgataagttcactaatatatgtcattgggcaatgtttgctttaatttttcctggcccacaggtaataatttcttcagcaataaataagtagctcttgtatttcaaaacatttttataaccacatttaaaaatatttgtttttttctcattgttttgaatttttttgggggggacttcaattatgataaggtagcactcccttgccagactttacgtctctttcacattattcatttttctcatttctgtcctttctctcctctttgtatttttgcaatgctatttttcccttttacttcttccagtttcatttttatatattgagtttcttatttctacttgctttccgaattctggtgccttatgcttcatcttctcctattacatcaccatttcttccctgtcataattcttggtctcctttcatgtaagtgagggattcaccaagttttaaaaattcctggcaagctatttggtcatagtgtttaactctgtatggtatttttcatcaattagtaagttttgctgctcttttaaatattgtttttcttatagtaactttgatattgtgctaggtcccactttaatacttactgctgaattgaattgatttttcctaaatgcttatttaaagtgggcttctgggtctaggcttcttgatccaaccttttccctctctattctgtcggaaagaatgatggttgcaagtgtcatttgtttatgtatttatttgtgtttgtgggtccctcttctgcctctttgatccacaaatggatgtgaagggacttttactgggagccttatttatactcatttttgcaaacaagaaacaaatgttgtccctcatgagttctccctcaccagaaatacatttttttctggtgttttctagaatccctcaatgatctccatcactcaccatatttcctctctctccttcctcccacatagcttgtgccttatgttagctgcttttggtggtcagtttttctcctaattttacagcaagtgaggcttatggttcctttttatttttattcatcttatttcattcatatgatttccaaaataagaagaagaaaggagaaatgttcacactagaaattatattaacttttgagatttagtacttgttaggtaccaaggcactaaaggaggctgtgaagtggggcatttgctcaacacctcctctatttccttttgaaagtgaaagcttcttgtctgtggttactcatatgtcatcgtatatttaaaaatcaaaaatacagtaacatatttcaaaggaaagatgtattaggaaacccctcactgagtcagattgtgtgtgtgtgttgtgtgaattacttatacaagtatatggaatgcctatataaaattttagtatctaacatatttcaaattctgcttaccaattctattcaaatcatgtaatcgtatgcatgcatcaaagtaaataacgctatgcaaaaaagaataacttctgaatgtaaagaaagctattaacaaagcttctggattggtgaattgcgagtgtctggctgttactgggtagataaatggccaagtcagacttgttgatggagagtggtcaggagttcaatctgcatgtggattagttggctttattttggaaacaagctgaccaaacttcagccagctttcacaaatgaagattttggctcagggaaaaaaatgcatatttactaaaaaataataaaatgtaaatgaaaataaaaatactttgcatctgaatagtgaaagatgcattactatctttatttagggcagacaacatgctgtttaggtacatgttcatcttttctccttttatattcttaatatttctttcatggtcgaatagactgtggtggaaactgtggtggaaaaaacctaggttgataggactccaatctagtgtttcttattaaattatcttccagttaagttgtagtaagtgtgctttatgtgtgtgatatatatttcgtacatttcttgctttctttattattggagtttctaaatcataatcagagtatttcatagctctgtaaattgtgttaacttcctaagtattttattttagagggagccagtgcgatgatgggaaagtgggacccttttttttttcttactactataaatatcttttattgtagacagttctaagaattgttttctattaaatagctatagttttttcttctggagaatttcagtttgcatcattagacacaaggattttcaaattttctattaaaatattcatgatatgtaagatgtgaatggtaatagtctcttaatagatacaaaaataacattttttactctaattattcagtaagaaataactcttgcaagacacagaagatatatgtttagatataaactgtttaccacctttcaacattaaaggtattaggagagtagaatatattttacactcttgcccatttatattctcctttcacatttggctcactcattcctttggccttagagttaggtgtgacagtgtattagctaagctgtctcagtcattcaggccttttatcagttctacaagacagatgctaaatagcatagtctaaattgaagtctctgatgactctcggagacaagttgaaggcaagaactgcacttgggcacttaaatatgtggcctttttctatatttaactgcaagaagaaggcagcttttaagtaaactttttagcctttaactgtcaagaatttttttaatcatttgattgttgcatctcattttgttaagaaaggctattaaccttttctttttctcctacaatggagaattttaaagatcactgctgcctattattttaaacaaaaataatttaaaacaaattttgttgtttaaccattgctttcaggacaattgtagactatagagacatttttgaaatgaaatattgcttccaaatgtgccacagtttatctataaattttgaatgacatactcacaatttacttagcaatctttgggacctccttatgtcatacagttattacagaagcatttttaaaatcaagtggacctgaaagaatctggtatctatgaaatggagatagatgttaagtaatagagctgaagaaaatatgctttgaaatgtcgactgggatatgtttccatagcctgtttgaatttcagttcaccaagaggaaaacaaggagttgatgtgttctttgcagttcctcttagctccaaaagtgtgtgaatgctctgataatattgtatgtcctcagtatgtgttgaattaatacattgaagttttccctgccagcccttgttgcctgtagtgccttatttttaaagactccgtaggatgctcactcaacatgttaagttagaaaggtgtagaaggaatcgtagaggtcagccaggaacattttacaggaggctgaggctgcaagggtccaatccccacacctggcagttcctccacgtgcgctgagccgtcttctgaactgcctgcgtcttcgtggacctccttaaatctttctggaaacaaggccgcttacaatgtgtggtcaagctgaaaaaccagctgtagtaccaaactgtgctaaatcttttagctgaaatatttgtcaattttctttttttttgaggcagagtctcgctctgttgcccaggctgggggatatcttgcctcactgcaactccacttcctgagttcaagcaattctcctgcctcagcctcccgagtagctgggattacatgtgtgtaccaccatgcccggctaatttttgtatttttagtagacatggggtttcaccatgttggccaggctggtctcaaactcctgacctcaggtgatccgccccccttggcctcccaaaatgctgggattataggcgtaagccaccatgcctggctaattttctacatattactatcttatactgatagcattgcatctttctcatagcaccgattagaaaaaaaaatgcatcataagttatttgtttttctgtgatcatcaaaaggcaatggtaatttaaatgtaatttattataatatgcacatgttaattttggtttttatttatgttcatcatatttaaactagtctctgcaagtactttagactaatttagattatttcctttaagtctaacagaaaccttagattttcaaccagatttttcatttggacaaatgaatttcaaaacaggaaatatgaattttattgcaagagatttcacctagaaagtgtattgatctcatcaatagtgaatttttggttataagattgtagtaataattaataactacttaaatttataaaatttatagaaaattcagacaaattaattctgatttaactgttaactacaaaagttgtaaatggacaaatacagggaatagcaaacataattttctaataattatttctaattaaaattgtacagaattcaggttcataggaaattataatacgtttttgtctggatccactgaaacctgtaggtactctgtaaaggctaagtaacattttctaatgaaaaggaacaatgccttcagatcgaagaggtttatcttctgagtttgcagaattctatatattttttgtgacatttctcatattcttatttcaagtgcagattgtgggtggtatttttatctcttctcctaataatatatatcttggagctaatgtatttgagttgtatttttccccgctcgtactaaacctagtaacttgtgaaaattaagtagtcaatatatttttaatgaataaatgatataggtaaaagtctaatttagagctattttcttaactctgtttctagtaaataatttagtttatgtgaccatagatccccaaattcatatttatgagctcctaacattgaaaaacttactctgcactttacatgtttctctggccattttatgtaagtgcattggttatacatatagcttgttttctaaaatccactgcggttccataagtggttatataatttatgaattccagtgtaatagtccattaatttacctctcttttcctatttccagttaccattggttttgacctccttcagcaatcacaccttgctaacatctcagatcttgacatcccacagggtagaaaggctcctatagaatacagatccttcttcatatttctcacccattcctcagtgcactacagtctggcttccacctcatcatgtcactactgcttttagattttcagatggatactttcagtcctcctcttaatgatctccctttattattaaaaaacaaaaacaaaaaaaatggtctctctcacttgttgaattttatggtatcatcccttttccattttcttgctactattctgactattctttctattctcctatagaatcctcttgttgttaaatattcaggtactgtcttggggcctcagcctttttctcactatacactctctctttgggaaaagttgcccgtttccatagattgaacctaccacttggtcacagccaaacataaccaacagcttagacctctctaataaggactcttcagatgtccagttgttcagtgaccccccaagttgtttaccccacaggtattgcaagcttaatgtgaagaaggatcaaaccccacttcacagtagggatgtggtttgttaggaaaggtttgtgctgagtcttgaaggtgattaatggttattcaggagaaaaggaaggagaaaagaaaagagtgagggcacgagggagaattacaggctgatggaaaatcatggagaccaaggaggagcaggatatatttgagactgccagcattttggtgtgactaatgcttgaagggcctgtgcaggaacaacctgagagactgacagtcagcttgcaaatgtctttgtgtagtgtgtcaatgggaaatcattgatggattttaagtagatgagagatatgatttaattagtctattagaatattcattgtgcagcacacagaggaatcaactagaaaaagcaaagctggaggcaaaaagagcaaataaagaaaagacagagactttcttacacaaaatttaaaacttttaaatgctaaataaataaaatgggaaacaaagatgataagatattttcagtcaatacaaccagtatttaatatattccagtataaagatctcatacaaattaacattaatgaggaaaagacatgaacacgcattcacaatgcatgcatattgtatttatacaaaatgagaaaatgctcatcctcctttgttaaatgtagtaatctaaattgaacaggaagactcatctattttttaattagaaaataatattatcaagatcataaaatatacaaaaaatttacctcattatctcactttggagactctgtctgaaggaaataatataaaacatcatatgcctggaatatttatacaatgtaattacaataggcaaaaaattgaaataatataaattccaaatataatggcaaatagtaggtggaatattacttagctattaaatacaaaattttgatagaaatggcaacatcgaaacatattaaactaagtttaaaagtacactaaatggaaaggacataaaaatgtaaaaatatggtatctgcagtgctatgtttttgaaaagtttaaagggaaaagcacaaagttattaataggtggtaggattacaagtgatttaataagattttcttgcaagctttctacagtttcttattatttatatgatttaaacaaatagacaatttgtaactttgtagtcttgaaatctaaattccatctctgcctgtagctctcctcatccaatcggtcaggtgccccgaataatcctttagatttttgcttgaatttaataatctaggacagtgactgagggacatgtcctgtagagacaaagagattgggggttaaagtctttttctgactgtgtgctgacatggtgatttccagccggttattttctctcttcaatttccttgtctgtgaaataattttcatacggttttgttgcaaattgataccagtaatgttcataaagcaatgaacacagtatgaggggttttgttcttattcttgatgccaccttaatttaaggcttttgccatcccatgcttggaccactgcattgaaatgcagaccattcaccttgactctatattctcctgacctcaggccattctgttagaccttgactgaaaacccttcgggaagttgatggctcaaatcacttgaagttttccctgccagccattgttgcctatagtgccttatttttaaagactctataggatgcttaccaatatattgaatatttattgaaatacagtcatgtattccttaaatgtggggatccattcatgcgttgttaggcaatttcatcattgcatgaacatcatacagtgtacttacacaaacttagatggtattgcctactacacacctagactatgtgttgtagcctattgctcctgggcttcagacctgtacaagatgttactgtattgaatgctgtaggtaaatgtaagaagatggtaagtacttgtgtatcttaaacatatctaaagatagaaaaggtatggtaaaaatatggtgttataatcttctgggactacaatggtatatgtggtccgttgtttactgaaacattgttctgcaacacatgactatatataaagggcgaccttggagatatcacagattcagtttcagaccactgcaatgaagcaaatatctcagttcagagagtcacgtggtttttttgtttcccagtgcatataaattatatttatactatattatagtctaataaggtacaatagcattatgtctaaaaacaatgagcctaccataattaaaaatactgctaaaatatgctaacaatcatctgagccttcagtgagtcttagtctttttgctggtggagggtcttgctttgaggctgatggctgctgactgatcagtgtggtggttgctgaaagctggtgtggctgtgatgatttcttaaaataagacaacaatgaaatttgctgcattgattgatttttcttttcatgaaagatttctctgtagcatgtgatgctgtttaataccatttgatgcacagtaaaacttctttcaaaattggagtcaatcttctcaaattgtgcccatgctttatcaattaagtttatgtttgctgtcattgtccttttttatcattttgataatgttcaaagtatcttcaccaggagtagattctgcctcaagaaactactttctttgctcatccataagaagcagctcctcattaaagttttttatgaggttgcagcaatttggtcacatcttcacttctaattctagactttttgctatttctgctacatctccagttactccactgcagtcttgaacccttcaaagttattcatgaggattggaatcatccttccttttaatgttgatattttgacctcttcctatgaatcagaaaggttcttaatggcatttagaatggtaaatcctgaatcttttgcagaatatttaaatttacattgcccagatacatcagaggaatcaccatctatggcagctagagccttacaaaaatgtatttctttctttcctttttttttttttagatcgagtttcactcttgttgcccaggctggagtgcaatagcacaatctcagcttactgcaacctctgcctcccgggttcaagcgattctcctgcctcagtctcccaagtatctgggatcacaggcatgcaccaccacgcccagctaattttgtatttttagtagagccagggtttcaccatgttggtcaggctggtcttgaactcctgacctcaggtgatccacccccacctcaggcttccaaagtgctgggattacaggtgtgagccaccacacctggcctaaaatgtatttcttaagtaaaaaaaaaaaaaaagctgaaagtcaaaattaccccttgatgcatgggctgcagaatgggtgttgtgtaagcagggatgaaaacaacattcatctccttgtacatctccatcagagctctagggataccaagagctttgtcaatgaggagaatactttgaaagaaatctttttttctgagcagtagatctcaacagtgggctgaaaatattcaataaaccatgctatatacagatgtgttgtcatccaggctttgttgttccatttacagagtacaggaagcatagattttgcctcattattaagggctctagaactttttaagtgctcagtgaccactggcttcaacttagagtcaccagctgcgttagcccctaacaagagagtcagcctgtcttttgaaacttcaaagccaagcattgaattatcctcagtagctttagcagcccagtgtcctcttccaatagaaggctgtttattctacattaaaaatctgttgtttactgtagccactttcatcatttatcttaggtagatcttctggaaaatttgctgcagcttctccatcagcacttgctgcctcaccttgcactttaatttatggagatggtttctttccatacatctcacaaatcaacctctactagcttcacacttttcttctgaagcttcctcacctctctcagccttcacagaattgaagacagttagggccttcctctggattaggctttggcttgagagaatgttgtggctggtttgatcttctatccagaccactcaaactttttccgtatcagcaataagcctgtttcactttctcattattcatgtgttcactgggatagcactttttatttccttcaagaacttttcctttgcattcacaacttggctaactatttggtacaagaggtcttccagcctgtcctggtgtccaatatgccttcttcactgagcttaattatttctagcttttgattcagaggaagagatgtgtgactcttcccttcattcgaacacttaggagccatgtagagttattaattggactcatttcaatattgttctgtctcgggaaatagggaggcctgaggaagggagagagataggggaatggccaattggtggagcagttagaacacaaacatttatggattaaatttgttgccttatatgagagttgtttgtggtactcccccaaaatcacaatagtaacattgaagattactgatcacaggtcaccataacagatataataatgatgaaaaattgaaatagtaccaggattaccaaaacatgatgcagagacatgaagtgagccgatgctgttggaaaaatggcactgatagtcttacacaatgctaggttgccacagaccttcaatttactaaataaacacaatatctgtgaagcacaataaaccaaagtgcaataaaatgaatgtctctacgtatccgtaacaaataagactcatatcttttctgactatcatgatcataatatattgttaaattcttaaattgttatattgttataacttattataatcattttacttggtattatgagctcatttttgctatcattgagacacctatcttctattacaatacaattttcttattgtaataattttgtaagcattgtcctggtcatttggtgaccttgagtattgtaaaatttctgatgtagtgaagcaattacagttggcaaatgaggcagatactgaattacagaacttctcactcaggagcctacgctgaaggtaaccgatttaccattcctgagactaacagtccagtcctgacagaactcaagtcaacaggtcttgcccacccgtttataacaatggcgttttcatgaatcagaatttcagattgaacctgatgaaaacaagtaatcaatatctttgcatcctattgtttcagtgttctagtgggttggctaaatgggccaattagaataacacaatgcaaatttcctgcttgatataaaagtcttttttaaacagcttcagtttatgctaaataataaaaatagtgaaaaggaaattttcaaactatatgatgaagacttcaagagccttacattccttccttattattattagttttgtgaccatatgatggacactgtgatctaagtcctaaatccattatgccacattccgtaaatgtaggcatataaagtattctgtcatctgtagttatttcaaactgcattcaatatcttggttcccaagtgcattggattttattaaaagcattctgctgtaacatccattcttcccaattggtttacagattgcccctaccattcaggcaaaccctaattgcattttcccacaaatctcgtttgatttatggtctcttgtttgctttatattatttataataaattgaggtaaaattcttaaaacatgaaataaaatttataatattttctcttctacaaatatggaacttacctaaggattttcagagtcgttttgcttgttttaaaagttgtttagacaagctacaaccatctgcatggtttccaataataagttctttattaccatcccagaattaattatatttcgcttgattttttttatgtacagatgtttaggattatatggaataaattatgtatagaatataaaaatggtatgtccttctataaagcttaggtggttacacatgtcatatgtacctggaacagaaaaaaatattatttcagcagtagtgacaaagcatctgcataaaattcagtgccactgatgcaccgagacagctaattgagaacattcttgcttctgttacaagttccggcttttgagatgccaagagttagtttagaatggatctatagcagatcccaaaaagtataaagtgtttaaaaataagtaaatagcagaaatataaagacagaggataccagagacttaagaagagaatttctcactgtcaagtgattacatatcaccatggattattttgtaaagttctcttctaaataaaggctttccatggaagtgcaggcatggaatcatttctgtagggtacatgaaaatttattgaaaggaagaagtataagttatctatatcgatttatgaatagccttctaagctttgttagaaatgtgtctattcagtcaaaagtttgaacattaagaattttgagctgagaatcagaaagattggagtatattcagtataagagacaaaaagaaaagagaaattgattttttgagaagtgcaaagacaaaagggggaaagatggatgatctcaacaaattttagaccaactcagtaagtgggaggcttattatcaacagtaaaaataactatgtgacttctagaaaaactcagaaagggtggttagtggatgattagcaaacaaaatatctaaataatggttgtagttgagtttcttaaatggggctttgggactttcctcttcactagaatagtaaagaggccccaacatctgcagtgccagtggagacctcacgaggagcttgggcttgttccccacttagtgacgaaagagttgtctccttcccattggagttaagtcagaggactgcctagagagtcaggaatttcaccactgcccagggtaatgaggccacactgtttatgatgtcagtgtggacaatgggggagcagtaatgagtcactcctgccccttccagccaggagggcatcagtggaggcctagtgggttctggaatctccatccccacccagtattaataaggcactccctcctctggggtcacccagtattaatgaagcattctctcctctggggtcagcagacgccaagtagagtaatgagacctctaccccaacttggcagtaataaggtagcacccttcccccaacctttgccagagaaatgtcagaataagcaagctaaaacggaagctttaagatctcataatataatgtatcaaacatactggtttcacaagaaaatcagtaatgacaccaagaatcaggaagatctcagagtgaatgtaaaaatataatcaacaggtgccaacaacaagataacagaaatgttagaaatgtctagggaagaattttaaattagttacttccaaaaatgcttttatgaatattatgacacccttgagacaatgaaagagtggaaagtctcagaaaagaaatagacgatataaagatgaaccaaatagaaattgtagaactgaaaatacaactcaaattaaataaaagcatatttgggctcaacagcagaatgcagtaggcagaaggaagaatccacaaacttgaagatagagcagtagaagttacccaatatgaacgacagagaaaacaggctggaaaaagaaaaagtttcagggatctgtggcactgtaacaaaagatctaacattaatgtcattggagtctacaaggaaaggaaaaagaagccaggccaaagaagtactcaaagaaataatgactgaaaactttctaaatttggcaagagacatgaacctacagattcacaaagttgaacaaacttcaaacaggataaaaagcaaagaaatgcatgcaaaggcacatcgtaattaaacttctgaaaattaaagacagagaaaaatcgtggcataactaaaaaaaagtggcaccttataaataagggaaagcaatgtgaatgagagtggatttatcatccaaagccttgaagggtagatggaagtggcacactatttttcaagtgctaaaagatagaaccatgaaccttaaatcctacatccagttaaaatgtagttttggaaatgcagaagaaatcaataaaattggccaacttctagtaagacagacaaaggagaaaccgaagacacaaattaccaaatatcagaaatgaagaatggatatcttgagagaccctccagacatcagaaggataatacagaaaaaacacaagcaattctacacttgtaagtttaactacttaaataaaacgggccaattcctcagaaaatacatgttactgcaagtcatccaataggaagcagattctttgagtagctctataactttaaaggctattacatttgtaatagaaaactccatatcaaaaggtgacagaataaaaatcacagaagcatattgactgacgcagaaaaaaattgaaaaaattgaacatttagttataatgaaaaactatcagaaaaataagaatagagggggaaaggtcatcaacttgttaaagagcatctacaaaaaattttgcaactttattcataatagccaaacccaggaagtaatccatatgacctttaaaggtggatgggtagacaaactgatgtatccatgccatggaataccattcaccattaaacagcaatgaactgttgatataggttgacaaccccttatctgaaatgcttgggattcaaagtgttttggatttttgattttttcagctccaataagcatttcctgtgaacaaccatgtcagcgctcaaaaagtttcagattttggagcttttcagattttgatactcaatctgtacacacaacaacttatatgattctacagagatttatgtggagtgaaaaaggccaattccaaagggttacatgttgtatgattcttgaaataacaaaattatagaaatgaagaggacatagttgttgctaggggacgaaggttaaggggaagaaagagtgtggctgtataagggcaaattgagggaactttgtggtggtagaaatgttcttgtctgtatcaatgtcaataacctattgtgatatagtatcacagtttgtaggatattcccattcgggaaagcaactaaaggctatgtgtgttctctgtgtgttatttcttacaactgcatatggatctatgattatcttaacaaaaagttaaacaagaaaaataaaataaaataaatgaggcttttgctgaccagtaatcagtgttctacaataacaatacacacacacatgcacatacatatttgcactatacactggcactattgcacataatttactataaatatttgttcacacatttatgctcatttaacttggtcaaattttctttctttagattgtattatatcacttttttgagggtgttaaaatggtgccatattggtagatgttaccatctaccttttctaaaaaaaaataactttttggcaacataaaaatttgtcaatcatttatcatttccaaaaaatgtgattcaagatttactcctccatgaatttcagaagtccaggaatcacagttctacagtttccatgatagtaatatagctaaaactgttctttttatgtagcctccagcttaaagagctgaacaaaatagttgttaaatacatgtggttatttgataattgaatgaatttgactgaaaatggtggctattaattctaattccagaacaaattcctaatcttcaataagtaaaaggaaatcttccttcctactggtaatacccaatgctgcctcaattactcatataatcatatactgggagtaatgtgctatgtagtggagtaaattctaaactctaataaatgtgtgttacctcactcttcaactccacttcagcatttaatcattgtaataaggtatttcttaataccacacttaatttcaaatataatccttttatatatgtattagatacaatgtatttttcatatctaatatgtgtattgtatgtttatttattgtatgttatttagatatgttaatatattcattaaaattggagtttttaacaaaaatattacaaattaacatataaaataactaaaaatattaggttatattattttgtctatagttagtattagcaaagtaataatgaatttattaagctaatatataaaatgactagtatttaccttttttcagtaagcagggaaaaataatcgtgtttagactatatgtaaggaacagaatagtacatttattttctaaatagtttacttactactttcaattttgtaatctaatgaattagttccaatgtaaatacagatttaaaagatgtattcattgtaaataactctatagggaatatttcttcttcaatgaaaatttcagttttggagatggaagtttctcatcagttctaatttctcacctattctaatgttactttcttgtgaattcatgttaccaaatgtatgctgtacacacacatagtaggccacctttttctctttctacactaatttattattagttttatatcattttagtagttttattgttaatattcataatgtgagaacatattccactattttccatatatatagaaagattgaaatgttttaaattacttcagtattccataaagtatatcagacccaagattagaatttataagtatttgaaattgtaaaagttttaacattctaagcgtaagacacctctattaaaatgtttttcacaaacataatatcagttttctcttccctctaaagtgatattttaagagacattttctaggaatgctttctaaagtagcttgaaataaagtagacttttaatagtgattataaaataattttctttcccaggtgtttgtattaacagatttctgttgtcccttatttgataatgtgtttttatcttccaacatatttatacaaactgaaatctttaaaaacagaaagttcttttattatgaatttttttagtatgtcttaaaacctgatccctatttttttttttccaattaaggtgagaggccctccagctgcaggggcatttaaagaaagaccaaccaagcccacagcatttcgaaaattctatgagcgaggtgacttcccaattgcccttgagcatgattcgaaaggaaacaaaatcgcctggaaggtaagtcagggcacagctgtgccggccagctgcacccgctgaagtgacatctcccaatgccaaacacacttggctgcttaagtaaataaactggagtcatttctcagcacatggaagatggtgggaaagctcttagagaaagcccccctgtgtcagccatccaccttgactaacaattaaattatagcctgcaaagaagaaaatgacagagttgctttgccttagagagttgtctgctgcccaattcatctctatttttatgagaacctggcagcccggcctgtttcaggcagtccatcaaatgatggaactggtggctggatacggagagcaacagccatttatctcccccagatttcaccttcctgcaggacacttccaaatggaagctttaattacctaaatggataggtcaagattgtctgctccctggaaatgcagagtagaatacaaaagcaggccgatcccaatcctggctctcctctccgtccccgcctgtgtcagcaagcgcgatggctgtcacacgtgccctgttagaggctgacctccaccgccaaagccattacagcacggacatttttctgacaaaaggttaattggcttcaaaataaatgtattgcctaatgactccattctaatgtggttgtgttcctttgtaaaaggctcactgatgttatttgtaaaaacttgccaatctcttaaccggagaaggcttttacatttaatctgagaaaaataaatgctggtctctaaccagcttctgctatttaattattgttgttatcaaagactttgcttttggtgatatttatcaactaaaagggcttctctgcctacagacagcaaagcagttgtgcacacttatgagtatcacatcaggttaaggacaagaaaaggttttggccaactattagttaaattaagcaattgacacatttaactgggaagtccagcagtcgtgaccaaaagcaaatcaggaattgtttttaattagtaacaaataaatttatgttaaaaataaaagtacaaatcagagaaatcaaagtaaatagcttaaaaaggtgcattaaaattaaatttttccttcctgtatagacacattgaaaggattattgcattatatctagtatgtcttttgaaatattttcatattgttatcaaacatttctaattcttgagcagtcatccaatatcagttattgaacttagaattattccaacttatattacaagaggaacttggtagtatccttattaggaaaccttactataaaattttgggggggtgggaaagaggtgagtaacattattatctcctttataatagtgtctgttagaatgtgaacttgttatgtgaaaatgtacgtatgatgagaaaaaatttatagcgtgtataactaactttcatactttagtcttaatataagcatatatttccaaagttttgtttggatttttggattcatatatttgattggttgcatggattttgtgtttgcctgtctatgtactggctcatagatatgtactggctccaagataatacaatggagtttcttcaaaacctgattcctgttgagtaaaataatatgtcataattctttataaaaagggagtggcttttggtgttttaggtaattataacctacacataaattgtattaatgaaaataaattatatagatttactatgattcaaataattttatgagcaacctttagaagtgtagagactagaaaaaatcattttgaaaataaattattaataaaaatatgagatgaatcattttctttatctttgataatccaacagtcagcagggatataaaatgcttttcttttttatggatatattaattctcttaagctactattgattatagtactgattcagcaagctaaaaagtaataaaaagaagaaacaatttctttgctgtcactggtagtataatagcataaatttaggaaaacatcttattccggaagctgtggacttcttttagacagtagctactacattttaattgcattactgtaacactgaagataagacattaagattattttttattttatttatttattttttgagacggagtctcgctctgtcccccaggctagagcgcagtgacacgatcttggctcactgcaacctccgcctcctgggttcacgccattctcctgcctcagcctcccgagtagctgggactacaggctcccgccaccacgcccggctaattttttgtatttttagtagagacggggtttcactgtgttagccaggatggtctcgatctcctgacctcgtgatccgcctgtctcagcttcccaaagtgctgggattacaggcgtgagccaccgcgcccagccaagacattaagattgttaaacataggcttgggaaccatctgtccatagtttcatatttatttcgtggcacatttgatgaaaggacaatctggtgctaagtaggaggagggacttgttttaggatgccattcttaaggaagaactcttgagtgttgaaggaagcagggcgatccgtcccccacaaaaaactaaaagcaagaggccaagaccctgcactcttctcttgtgtgtgggcagagcaccggtttctggtcatgcaaacctctggtctcaatgtcatagctcatccctcactgaggactgctgaggagcagtgcttccctccgaggataccggccctctctcaactctcctcagacaccctagagactccaagtggacttgtgagcacctgaaatgatgcacataactaagtgagaagcaggtctgttgcttttatcagtgtttccagagcctgtggctccgaaggacttaggatgcactggctgtaaaccccggcacaggctgccccagcctctcacggtcattccagtctgtgaatgtgctggtctggggatccctccccaggtcctcagactcctcttctatttgttctggattagctgacctgatcttcaccaggttaggaaccattgtgtgttcttgaaataacaaaggcactctatggtaacatcagaaagtagaagcaagagttagagacagacagatgtctttgcatgcttaggtttctcagcccacgccctgctctcagtaccagtttcatgcacatggaagtggtcattagttccagatgccaaaacaacgtggcaggctgcgtgtcatcgtctctgcagcttcgtctctttcttgtggcatctctgaagattgcagcagtgtctgatccaacagtctgcagtggtggaaatgttctacatctgcaccgtctaatatggtacaattggccatatgtggtgattaagcacttgaaatgtgcctacggagactgaggaactcaatttttaattttatttaattttaattaattttaatttaaatagccacgtggttaccatattagaccatgcagctacagattaagataatggcagtcaaaaataaatgcctgaatctgctacccagatagatagaaggctatcactgtgttagaatttttattattaaagtgaaaaaacgggactcatctgtggattttttgtcatggttttctatgcatatcataaatttattagtaaatgtgagaaacgttttgcaaaatgtttgtagtgaaaatttctatatacttatcaatggcaagttcatgagctatgaaagttgaataaatctcatctcgaatatgaaatctaccggcaagcccaggaatagctttttttttaatttttaaatatgcattttctaaatatcactaaagaattcttgattatcaatggttgtagttataaaaaagcataaggaatacttaaacaaaaaaaatgttaatctgtttcttttgctacattttccttgacccctctaacatttgggaaatacgactgttgattcttttgctgtcttcaatatccacattattggcaacaagtgagaaaagagctaagctgtctggataagttacaaagcagataatcagatgaacgatggaattttaaaaattgtgtttgagttttctcatcttaaattgccatcctttaattttctgtccttctgtaatataaatcgcacacttctaatgatggtgatcggggtggggacggggctctttgtaaaggttttccatatgggcacctggggagggaagaaatgctatatgaattggtaaaatacatggcccattgtctctacctctgctgtgtaaataaagagcgaagagaagcatacaagtggttttgaaacggtctcttcaatagagacctcgagagaaagagatgaagataaatacctgaggcactgttaatttttagaaataactatatcatattataaaccattcatttattttgaagatggaaacagctacacctacataaaggtgtctctaaaatctttcactttctaggcattttgatgtagtagatattgatacaggtcatctttctccatgataacgtgctacgtgacagaatatgacatgcactaagacggtcttgttttccactaaatttctaataaccaggcgtaagaatgtcccaggtatcagagatatttgaataggacgtagataaacctgtaatcctctaggaaaatcaggatagaataccacccttttatgcatgcaacaaaatcacaaacctctcaaatttgaaagggagaaactcaaaatggacttgtattttgtccaaaatccttccccactgcccgcacagcacccgatcaacccacacccggcaatgtcatgatggtccttgtccagagtagcagacatgccagaggcctttctgcgttcttgttttttcttctttgacacgtaaatgatattccatagccacctatattgaaatgaataaaaccagaactgatacatatgagcaggtatatgtgagaatggacttaggtggcctctactcactgccaaaaatgtatcttcctcactgccctattagagaatatgaaatctcaccatggaggcaaatttccccttaggttaatatagtaattttacctgttgattaaaatttagatctccagactttgttttgtattaaaaaatgacttattaatcaggtaactatacacatttaatactttttataaataaatgttgacatacatatgtcatttatatatttataccccacattatttcaaaacggatttaaattgtcttacaaaaaaactataaagtcagcaaaaataagagatgagagaaatgaaaaccatagggacccaaaatggatccagtaacaatgttagtaaaaacaggcatatcctgaaatcctataaggcgagatctttgtctgtatttctggtttattcactcactttcctggtacctagaacagtactgtcacagggcaggtgcccagggatatttgttgaatgcaagtaaagcatacaggagctgattgtttttaagttttatttctcttgcttcgtaggcctcactttccttatctgtaagtgacaacaatataccaggtgatttctatggcccttttaaattatgagcattcaaataagttttgtttcataattattaaaataattgtattttgatatgttggtggaatacttcaaagaacaaatattgagtacaaatttgccacagagatcaattcttctggtagcaaaatggaaatattagcagcagcacatttaatttgaatccatagcactttaggttccagaatgatatgcaacggtcttgagggggttgaacttttaccaggaggatgctctttaggttatacacgaatgctttccaatgactactcatcccttaaagtttgctttcaaaatgacaaattcgcttccctttctaaaggactgaaaatatatgttgcacttgaacacccaagtaaaggaaatgctgtgaataaattaattagatgcataaatcagcctttataatttccactgatggtgtctcagacaacacctttaattatgtgttgactgacaattccattcagtatttcttctctggcattttctcctttttttctagttctttttatttctcagcagcattggtattcaggaactataaaaatctctgtcaatgtgactgttttcattgacataactgataatttcctagtaggaaaaacagttattgcatataattattataaaaatatgcacacattttcttacaattaaaatcagcccaactgaggatagctcattatctgtaaatattactgcattttaaagtaaatcacactgtgatgtgatactcgatccatttgctatcagaatattcacaagattccgtaattttgagttataatttagtcccttggtaccttcaatttcttaatgtttcaatttcttaaggattttaaaaaaataatgctatatctgttgcccctaaggtaaaactgatattgacttttgaaatcttgtaggcaaatttatttgagctgaataatttgtttcacatcaaggagaatgaatgttctcttggaattgtcctgggtttctatttcttttgataactgccaaagcttgagtttggataataggacttagtagaatttgcaaggcaaattttacaagagaagtgacaatttacctgatttttgtacaagagatctgccacgttcccacaattatttcctttgtgattaattaatagacagagcttattccagaagttttgaaaaaaaaaatcctctggcaatgagtgtactattcttaatgccattcttttatttgatgtaaattgttacatcttaaaagtgtatagcatgaaaatacagccatgtattagaaataacttttatttaaattggttagatgacctctgaaaaccagatgaaagattttctgctgaatgggctggtgctccctgctgcctatataatttatgtgagaaattagtgcaaatggttcacttttatgtagcagagctgcttgtagcaagcctgcagaaacaattttcccccaagcctccatctgttcttcaaactagggcatacgccatctcatcgagcttgaaagtcaactgatttataactcctggaaagtgtatagattgaaaagaaaggtcgactgctgctctgtgacagtgatttgtttggcattggctaaagacaattcacattaccagggacccaagggaaacaagaaatgttgtaagtttcagatctcagtagactgacaactagaagaaaaacaaatcactcctgctttttaagtcagacgaccaccagggttgaaaagtaggtcttggtagtgttaagggtgccaaagctaagctgccacccatattgtcacttagcacctcatgaagaaatgtgtcactgcccaccctctcagtggtaaatgttgacgttgtagaagtatcaatactctaatttttaaacacaaaatatgtgtcactgcttgtcagaatgttctgtttggagacacaaattggtctttgatgaattttctgtatctacccaaggataatctccagttgtattccaattagtaatttaatgaacagttcgctcctgtcttatcactcgtcacacgtctcttctctttactgaagcactattgagatcaaaagtcctttgacagatgacaaatggaatcagattggcagtatgcttgtaaacaacaacaagaaaatcattctttgtttgatgttttcctttgagtagtcaaagtatcatcctcccagataacaacttttagtctattgaagtttttgttgtcttttttctacatgtatgtatgttttttattttgtcgaaactgtgtttcacatgataatttttaaggaactcaaaggaacattcatggtcctaattaagacaggagattgatagtggacatactgccacaggaattctaatagttttttccagtttaatgacaacgaaaaagacaatcatcttttaatgtgcaggtttaagttttcagcggtcattactaagacctttggaaaggagatacccaaacatgtttctatgcaaagctccatgttagcagggatgcacatacatggcttttcctgtagtaattctcatggtatggtgcccaaccacgtaagcaggcttgcctttgtgagcatgtcattaccatgtttttgaagagcagagtaactactattttcacaaagttcattatgtatgaagcacatttcttgctattgggaaaagtatagaaatggacagagttgacagaatcattttaaagccaacctctgcccctactctaagagactgtctttacaacaaatactcctacagaatttccaagattgggttctaatctgagtaaaagaaaacccatcaacctttgtagccataaattctcaaattttgagttcttatttagattgatctctctctgttcattcatagttttaagcacttaaaaaaaacaggtatatggtttgaatatttctgaattcttgaatatcttgaaaatataaaatttcaactttcatgtacataaaacacaatttaattgaaattagcattcttaaattacaattgcttcccttcatatctctttagaagataacatctttgtattctattaatgacatatgttatgttaggtatattataacacatgtattataacatgtattataacatatatgtatatgtataacatataacatatgttattatgttatgtatatccaattccattgatctcattttctgtagaaattccctttattttctgcctgcacatttgttattatactgatttgccgttgcatgttacattttcctttttctgtatcttcacagataattttgtggtatgtggagagatactgtgtcagagatttgtgtcaagatgctatgtatatatgctgaaaaattaagactagcctgattttattcctttaatgtcaatgtattgtttgtttgtttgttttgtttaacagccttggtaaatgcactatttttgtgtaattaaaaattgcttccatgtatttttcttttccttttgtgtattcttccattagtacagtaagcttattgtctacttacttgaaactttctcaactgaggaaagttttcttttgtaatattacttattgttactctgtcccaattttctgttttctttcttagaacaaatattacatgtagattatacatttatattctgttctattatttctatcattatctccctcaatatttttatctctttatccttgttttaacttctggcagagctttcttttctcttctttttttttttttgagacagagtcttgctctgttgcccaggctggagtgcagtggtgcaatctcggctcactgcaagctccacctcctgggttcaagcgattctcctgcctcagcctcccgagtagctgggactacaggcgcccgccaccacacccggctaattttttctatttttttagtagagatgggatttcaccgtgttagccaagatggtctcgatctcctgacctcgtgatccgcctgcctaggcctcccaaagtgctgggattacaggcctgaaccaccgcgcctggccagagctttcttatgttttctatttttgttggtatggatctatccattactgccaccagttcaaattttagctgtgcttaggtaaactgccctgcacctggccaatacccagtgtctagcatgagcatgtttcacctggtcttattctgttggcctaaaaggggactttgtaacttctgacactgagatagctggagtacacaaacacctataatccctaaaaggcacaggtacccagctctgtctttgcctgcctttacctatagcattttgcttgtgggacacactgctttctaggacagaatgcaatgtggtaccagaaatctctgtccctacagagatttgttgttgtttcttgagttgactgtgaatggatgtaggaagggtgaatggaagtggatagtgctttgtcttgaaaggcaactacttcaaggtagcaggctggtggcctagtccctcccgcccccaccatcacccttttattctagaccttatgtttctgaccgggccaggaagggggatcagaaagtgtgggagagatgaaaaagctgactacctacctttggattggtgcctctggttgcaaaacataagttgactatgaattgtggttttccaatccaattccattgatctcattttctgtagaaattccttttattttctgcctgcacatttgttattatacagatttgccgttgcattttcctctttttctgtatcttcatagataattttgtggtatgttgggagatactgtgtcagagattcgtgtcaagatgctatttaaaaacactgagtccaattcatttttgtgcattaatggactatattcctttgcagagaagtaatgtgatctcattaacaggctacagtgacttgtctattcataaaggaattgagtacttataatgggaaagacatggtgctgagctctgtaacctgcataatatgagttctggtcttaagaagcttattgactagaatagatcactattcaaggaagaaaccgaaagtcctttcaaagagtatatatcaagtcttaagacagattgcttccgcttgcatagatcataattcttaatcctttatgcagtatgtgttaaacatttgctgcttcagtgatctggttcaaataatttctgtagacaaacttttcaaattgagagtctctataaaacttttgccagttcataaatggttatctatttcagggagtgcagcttgctgacacttttgtttttcttgtatttcagtttttttaattgccatattaagaaataataaattttacctttaaaatgacctttaggtagtcaatccacatacctatgtatctacatattgtggcaatcccaagtatcaataagatattactgacttcagtgttctactctgtactttgaaataaacactttgaaaaaaattatgtttttacctatttgtgaattttaaaggtttatcgtgcttgggattcagtctgatttaagtctgaagacttctggagtcatgattaaatacgagctgggctttctcattccagctttcacatctctgcatctccgttctcttattttctatctttttaaatcaccgtgtttcattcactttttaattcactgtgtgttgtaggtgatttcctcaactctgtcttccaacttaataatttactagtttaatctactgtataatttgttgaaattttttcaaatttactttcagtgaatatcaattctggaatttatatttgtttcttaaaaagatctgcctactcttatatttttctcactttatggtttctcttactatctttattagattgtatttttaagtcactcatttgaggttctttttcacactcatctattatcttgagctcctggggtgtgacttggaatctgccttctgtgggaggccctcgcggcctgggttgtgaaggcacccgtgtgctgtgctttcaggttcgtctctgcaggacacacattctgaacctcttttgatgtgaatcagccttcacgtttcctcactgggctcctgctcactgctctagatttgagtttccctttcatttctggggacttagtatttgcctatcttacttttgagaatggctatgcatttatttattttattttattttattttatttttcttcccgtatttatagttttggccatattgaccagaggtctattaattctgtaaaattgttttctcaattaactgaatatcttcgcttacatgcagattaaagtaccatcttgagatgtaatctttcctcaatgtcagaccaattctaatacttcctcaagtacaaaaaaaatcaatagaataaaatatgttttgtatttcccatggaagtccctttatgtaagcaagttacctttatgtaagctaatgtgtattgcatgattgtgtatgtgtgtgtgtaatcaaacacacataaattaaaactctgttgaacatagcaaaacttgggtttggaaaaatcacaaggaaaagacataaaaattttgtgccaacccacaactctcatttttgtatgtatatagtacgtgcatgtgtatgtgtgtatttacatgtatatgcaaatatgtgtagacattttgttcctatttcagtactggagtaaagatttttcttttttcttttttcttttttttttttttgagatggagtttcactcttgttgcccaggctggagtgcaatggtgcaatctcggctcatcgcaacctctatcacctgggttcaagctattctcctgcctcagcctcccaagtagctggaattacaggcatgcgccaccacacccagctaattttgtatttttagtagagacggggtttctccacgttggtcaggctggtctcgaactcctgacctcaggtgatctgcctgcctcagcctcccaaagtgctgggattagcgacgtgagccaccgcacccagccaagattttaattgtcatactgtaaaattaaggtgggtggggttatcctaaggagacctttatcttctcaatattcatatctattactatgaatctcttgagaagcattaacccttccaatggaaaacatctttcaaatgctttccatttgcagtaagttgcataacattttactaaacatcattcaatactttttaaaaatcaacaaattatagcattggattggaggtaatttagtgtttagaaatcatcttcatagaaataatcactgtagacttgttattaatttttatttttgaagagttgcttgggtaatgattaagtaatttatatatgcacaaaaagacttcatttacataaatttttatttatatattttaaatgcattatgagaagtgctagtgtattagattggtaatattaaaaccacaagtcaaaaaatacaaaagttaagatttttataattctatttgggaatctctagctttttctgttggtgtgggctataatttcaacactgcattattctaacttattacatttaataaactaacaattgggactagcttcaaatctcaagcagcaatttagtagatggttcatttcatgagaaagaaatatggactatggtgactatgactgtactattgcagaaatggaagaaagtgaaagtaaaatgtattggttagttgcaatattaccagtaatattttgtctggccaataatattagaatgtagatcaatttgcacaaataatgagctccacgaccaaatgaataatcctctatggaatatactagtattgcagaaaacctttttggtaagaaattttgcatgctattactgtaaagcatcattatttggcttcttaaataatcactttgttcttctcatcacttgatgtcttgtactttatacatcagacatctctgtgcatgtagattaccaaccatgctgcctccctttttgtctctgaacctgtaccatgctggcctctcttgaatgcctccattgcctccatatccacctcctctgctcagcctctaactgctcatctgcttgcacctggctcagctcttacagtctcctaaaagtctttcctgactttcccaggccagattgagtacccttcttggggaaaccagcatatgctattactggtctcatcactgagtaagatagtgatctgttttcacatctcccctcaagatgggggactgcagaagaactggagcagggttatttaactttgacctgccttagcccctgatacaacatgagtaaatattttaaggctgatgtttcaaatgattcattaaaatacatttttatacttttcatatatttttgtttgttgaatacagtagcaatttgaattttcatctacttgcaaaccaagaatgagggtggttatctgtgacttttaaattttctttacaggtcccatagatcttttggtagctctatttatttttgttttcttatagaatgtagtttgcagtacttttaaaacctgtatagtatcagctcactgaatattgctgattgctgaagaaaagtgtttgttcatttaaaccccagtgatctgatcatatttaaattgcattcttatctatgtgttgtctttaaatatgtgctgtccaattggtgctcatgtaacttgtaagaagcatcattcatttgctaggcattacctgagtacttactgggtgtcagaccctgctctgctctggaaatacagcagtgaatgaagcagcgaaattctcagggctcatggagcttccactacagtaggaaaactgaaacaaccaaacaaataaatatagagactgataaatggtaatagtatgaagcaaaataaagcagggtgaaagagagagttgtgagaggatatagcacccttttgtggggtggtcagaggaaattttccaaataaggtgacattaatgtgtaggctatttggtaatattgtctaaattatttttaaaaataagagtcctaacttaataatttgccctgtttaaaatgcagtgatatcaaaaagaataaagtgttaaagagaatgcaatgaaaataatctagtaaattgtgcaatttcaggacctagtactaaaaatcagtgtaagagttataacccgacactaatgaattaacaaattatattttaattaaatttttattccactaaaaccctaattgaggaatcatgaatgactgtgttttgtacatttcaacataaatattttgtgagtttatgcaaatatatatttcctttgtgaaaagtacttttcacatttcaaaaataagaaaaacctaaatagccaagcaaatccattttttgtgtcccctttctctcttcttttgaaagtaaaatcgttactagtgagcagatttagaaaaacaaacaggaaatgatgagacacatgtgagcagataaagtgtcatatctagattgtctttagagagggcacacgaaagcaagccccaaatgcaggcaaggcctggcctgcagggaagacacattcagatggagtcacagctcatgaacttttttgggatacaaatatataaaagtttctgctatggcagttgtataacaggatgtatctgagaaattaatggaattaaatgaaaagagatgaaactgagtattaaagacgtgcactattcatttgtttgttctgagcattctttcatccatcacacatttcagaaggttgcaatttattaagtgcagtgaaaatcactggtgatataggcctttgtgcagtgtatacaattagtcataagtacagtcatgagctgcataatgtggttttggtgaacgatgaactgcatattcgatggtgggaccgtaagattataacagatctgaaaaattcatattacctagcaatgacatagccattggaacgttcagcaacatatgttgccttttctcttcagagataaggatgttctttttctccgggtataggaagggcacccctcacatatgagggtcttatgaccggctttaggaaaacaaggtgggagaatgtgtgagagaacttcctgcttcttccatttttaaagatgtggcatatttggggatcgctgtcctgaccctgtcatcactcaatccctactttggactttagattatcttgcaatgccttctcattattatttattcaaatgggaccctaacacaaaaccaatgtggtatagaaagttaacagcaagaagggctagtgtctctgaggctgcagtaaacaggaggaagggcgtggtccactctcagaatgctgtcatggttcagagctgagggatttaatattgtttgggtatttttttctcttctctcaccctcttgccccattcctcactttatagcaacaccgatgtatttaccaacctcaagtgtactaacttgagcagtttggggaatcggggattaagatcttgtgcttcttggggccctggggacaatggttgaactgtgtcaggcagccagactggaatcaggtggagtcactggcaggttagaagcccttaattttgtcatgcctctcacttcctgtgaccctgacctgcccctacccactcacccacatggctccagccatactggcttccttgattttccaagaaaacaaaactcccaggtctcccgctggccttcatcaggaatgagtttctccaactcttggccaacttcccctcttcagggctgtgctccgatatatcaaacagccatccttggcacccattctcatccccctctccccagggacacagtgatgtttctccagagctcaataccatgcctgtcccaggcaaaacactgggataagaaagacattttgtctgtggctctcgctaccatccagtaatagctccaaatgattttagacagcaaggattaaaggatggtgatctagttgaaagtgtgcaggcatggtggggggtagacgtcttacattaaaacgatgtttacttatcaagcatttagttatttgggcggctttggtggagggctcagttgaaggagacgaagttggggagagaggactgagacatcctgagacatcccttctagctgctgctggaaccttcttacttttcttactttcaacaaacacgttctcagctctcctttatttagtcatgaatttactcatttattcaagaaacatgcgttgagcatctttgttactgccattagttccaataatatcttctatttctaatctgcttcattttgtcctattctgcctgctattaaaacccacctcttctgtgagaatcccatagattattgttattcttctaacataccgttcattctttaaacccagaagagtgcaactttcatgatggtatttggagcacggaggcaggcaggtagggtttagagggtaagagggagacaagcagagctgaagggttttgaaactgccttcaaagccaacgcatacaccaccacttattcattctaagataggtctttgtgattaaaatttagtgatgttcaatttatatttattgcttttcattgttttattaaatatttcattcgacaagtacttattgagcatttatgataagccagacattgattagatgctgtacatacagcatctaaattcttgccctggtagtgcttgagatcttgaataaggtgaaatcataagaatgccatattatttcttggcattagtgaaacttgatacatttattttgtttctttgattaaacttccttttgtaagttccaggatacatggcaggatgtgcagatttgttacataggtaaatgtgtgccatggtggtttgcggcacctatcaacccagcacctaggaattcagcccagcaagcattagttatttatcctgatgctctccctccccatgcacctccaccccacaagaggccccagtgtgtgttgtttccctccctgtgtccacgtgttctcattgttcagctccaacttgtaagtgagaatatacggtgtttaggttttctgttcctgagttagttttccaaggttaatggcttccagctccatccatgttcctgcaaaggacgtaatcttgctcctttttatggctgcatagtattccttggtatatatgtaccacattttctttatcaagtttatcattgatgggcatttgggttgattccatgtctttgctatcatgaatagcactgaagtgaatgtacacatgcatgtatctttataatagaatgatttatattcctttgtgtatatacccaggaatgggattgctgggtcaaatgtatgtctggctctaggtctttgaggaatcaccacactgtcttccacaatggttgaactaaattacattcccataaacagtgtaaaagcgttcctatttctccatagcctctccagaatctattgcttcttgacttttcaatactcgtcattctgacttgtgtgagatgatatctcattgtggttttgatttgcatttctctaatgatcgtgatgatgatgatgttgagcttttttcatgtttcttggccacataaatgtcttcttttgagaaatgtctgttcatgtcttttgcccacttcttaatggggttgtttgtttttttaagaaaagacattttttaatcaattatttttcatgaaatctaaatatgccttatcagtgctccaatctgtgtgggctggttgtttctaaattttatttttaataattgagtgatattaaataaaattcttgctatatttggtttaaaatggttttgatgtttagcttttgttagtggcatttacaaattctaaacaacttgtaccacatctattatattctttagcttctgctgggatttgctgtgtaaaagagagtgggaacaatgtagctcacattattctgataattaacatctgtgaaggacaagcttctgcataaatttttcccataatgggaggaagtgaatagaaacagaatgagcattgtgagctatggttttaatatttaaaatatttttctcttaggaactgaacctctagcttctgcacataaaagcagtctttttttttttttcatttttttgcccaaataaagatgattccaaataaactattatattttgtttgatgtcttcctttctactcaacaaaaccaatgatttgcaatttgaataacttttcaagcaatttctctttgttttttaaaaatcttttttatataatttatgaaatgaagatttaatcaacatttgaaaggagtgatgccatctcgatatttttacttaaatttcttttactagacctttcacagtggattcaggcataagtgcagggttttaaactttttcccctatcaactaataatgaggtgagttatgaaaaataataatttgtcataatttccaaaagaaattattacagccttcctattactagtgtcaaaagatgaattaactttcttttgttacctaaccatagccatgttgctaacttgatctcagctctcttggaaaaatgagaatacttccatatttaggcaatattccttctagctgttaagatgacttcagtttaatttggttgtctttcttctagtaactgcctcattcagagaagatattaccaacactttttgtcacttttgattcccctctggagctcttttattccccttgccttgataacttgtttgtgcagacttttctggaattggagcattgtttgtatcttttaaaaaacaatatgctaattattttgaaaaaacaatatgttgtttcttgactttttagtaattgccattctgactggcatgagatggtatttcattgtggttttcatttgcatttctgtaatcatcagtgatgttgaaccttttttcatatgtttgttggctgcataagtgtcttcttttgagaattgtttgttcatgtcttttgcccactttttaatgggactgcaattaaaaaaatatgtacttaaaaaaaccaatatgttaattaatttgaatttttaggacttttttcagtataacagttttacttttactgatgatatttttataagtattgatgcaatcttatttcttttctttcctaaaattgtggtaaaggcccatgatgtaaagtttaacatcataaccatttgtaactgtacagttcaagttgtggtaagtggtaagtgcattaacgttgtgcaaccaattttccaaacgttttttcatcttgcaagactgaaactctatgcccattaaacagctcctcactccctgctccccacatcccctgctaaccaccgctttactttctgtctctctgaaatggacataatgaatttcataagagatttttcatgtacgttaggtgcacagtgaagtgtatttgtttttgtatagattattggcaatatggcctccaaatgttaaaaaagagaagaaagttaagtcagttatgttttctacttggaatgtttagcagccacagagagttaagtaagaaaactgtacctgtactaaaaaattatcacaacatatgaaatacatataatttaattagacattaaaatatcagggtaaaaaggtgtttttaaaccctgtctaaaacattatatacattgtataacattgcatacattgtataatgaatgcatacataaaaggttataaaacctttaaaaatgatataagttgttttaggccagttgaattagctacatgccatttcccaaatatgctgtttaatatcccttaaaccaatgggcacatgtacgtgtgtatttttgtattcaattcacttttacctgcaaagaccctgattctgacatccttattaaaacttggaattgtttgatttttttaaaagatttgataattgcaaagggtatctagttatgcctcaagatcactggcctctctctatagcattttgccaaaaatactccttaaagcaactgtcctgtatctgaatgtagattctattatatttccatccaagcatttttgctaatatcatttgtatgttactttgatgtaatgaaacccagaaggtgcaatttcatgttaaagagcataatcagggcttatcatgtcctaatgccaaaccaaaatttggttctaatgtaaaacttgataataaaatttgaaaccaaaggggttttcctgatttacgtaaactattaaatcccctttattttggcatattaagttaaaataaactataagagtaacttaaacgaatatgcttacttacatttttattattctacttggcctcattgagccctgtttcaaggacttaactcaatgctcatttggttactctttttcattttcccatttccttccattgtttgaagcttggaataaattatacaagctaaactatattattttttcattatcttagtctttcttttctgatgatgaatatgctttagaaatggcttcttcagtaaaacattgtttcatcagtcattgctatctgatttaatatgcaaagtatacatgaagtattacaaaggagaatctttacattaaattttattctgtttgccatttgtcatcctttgagaattatttataaagcaaattccatttctaaaaagaagatataatatgatctggtccttctccctactctttttattgctatttgtaattaatagtgagggaagcactgtcttgagtcattggaacatgctaggaaatcattctgtgatgcacaccttcaagtataagaagataaatcacaaacagtaaattggatatcatgttaaaatatctgcaaacaattttttagccataaatgcattttataaatatgtatttaattatacatcttaaaatataggtttgatcatgcatctcgacaatgaaaaaccgaagggtttgtgaaattctatcctaagcagagaaaatctgtggttttttttgttgtgtggtgttatatattacacaagtagcatgtgctttttaattacctgccgtcatctatatgaacttgttgaggaaatgaaaattagcttaggtcttacaatctaccattggacacatttcaacaaaaagtaataactcactccaacttttcaactcttttaaggtcttctgttacaaattgtaatgaaaagaatcatacgatttgtgtgaaattcataagtaaaattgttctttccagtaggaaaaaagtggttaaaaataccctacttttttcttcctctcttttcctttgttttggtcagttttccgtcccacatcctgttctgtcttcttttgctttattgttattaaatactttcctgtcctaaatcttgaattctgacatatttttgcatggctttaaggttatatttgactttaacatgatttttatatattttttacttatttttggtaatacttcatacattcattgtgcagcattttgaatgggaaaaagagataatcactttttctcttctttattccttcgaattttcattatttccctcaatttataaatctttataacttaggctttctcccctttctttttcgcaattgggttatgttttcacatcctgggtctagcttggtacaggggtagtcagagggctgtgacttcagggaagcagaagcctcctcctcttcgcattctcctcaatatccataactgttgcttggcgcgttggcccagaggggtgaggtaggaacacctatctgaacacttccctttctttcctcttctgccttccatgatcgctcaagctgagggattcagctttcaggtttccaccacttttacatcataccgtcctttctgctactcaaaagtaccaaagagtggaggtggagggaagagccctatgtcatttagaaagaagttccattatcttttgcttctctctgcttcatttccctcgatttgattattttttataccttcaatcttgctcttttagtcacatcccttcttgttttttgtatttttcatttgatttaaaagagtgttttcttagcatattcttacaacttgtgctgtaaaattttattcaaagattatcatgaatattaggaagaaaaccagataaattctaaaccatttttctgtcttcaagtataaaactaatattcagatattagtttggggatttttcacaatgttacaaagctagtgagtagccctaatggagctagaacctaggtctgctatatccagtcctttctttctattatagcactaaaactcttgcagctgaatgttagagaagactcatatgcttctttacagaaaatttaagtatttttttttaacaatggttgacctgattcagagatggaaatgtaaataattggatgtaataagtagggaataatgtgggataagattaagtggaaaggcggaagctggattgtgaggggccctgaatgacaatctgaggtagcgcattgtcctgcgtagatagtgggggagatgataaagaaggaaattagtgttattaaagtctatgtttcaggcactaactattgtgaatcaagtattttattaaagaacaccgagtatatatgtaacacgcggtgctgataaagagtatttgggttgtcaccagcatgcatgttgaattggactctagcagctgtttcaacagtccacacattaaatgataaggagttggagtggaaagatggtggaagaggagatagaattggcaaataatagaatactagtgatcaagaggagggagacataaagggtgaattcacaatgttagcagcagaggatgagatgcaagtaatctatttcttttaagcaagagcaaaataaaaatctcataatttttagttggatttgacagaataatcctcacaacttatctggaaaaattaacaagcaaggaaatcaaatgacattttccaataagttaataaaaggtagacttatctcaattaagtttcaacaaattttagaaaggaaatagaactgagacaaccttaaattatctctgaaggagtacatacacaccgaccagtcatacacctcagcacatgttttaaaaactagaggggcctcacacaacagcaaggaaaggtaaacagtcatcaaaggcatctggaaacaggattaatgacttggaaggaaacaagaaattgttagcattcctgttgccatatatttaaataaattataggtgattttgaaaataaatacaaagaatcaaggtagagaaaataaagagcatttccttattgaaatgatacatcatatttattttagaaaaattagataatatagaaaaatgtaggcaaggaggaaaaaaagtttctaccagaaggaaccagtgttaatgttttggcagattttcttccatattattctttcctatcttagttgacttattattacatatcattttatattcaacgtaagtattttttcaggtataggagtttatgccaactgccgtagaaaataatcctctgaatctccgtggcttgacatagtaaggccatctgtcactcatctgtcagtccagtgggtcatggacaggcctctgctccaggcagtcactcagggacctaagttactttgattcttttcctgaatcctctcctgtatccttttcccatacatgtgggaggagaacatgtaggctaatcattatgagggacgtttatggtcccagactagaggttccattcttcactttcatctactttttgttgatcggaaatcagccaatcacatagccatgaataacttcaaagaaggctgggaaatacagtccagctgtgtacctcaaaggaaaagggaaatggtctgaacagtgagtctttcccacactagttattagaacccccttattaacatcatttttttttattattatactttaagttttagggtacatgtgcacattgtgcaggttagttacatatgtatacatatgccatgctggtgtgctgcacccactaactggtcatctagcattacgtatatctcccaatgctatccctcccccctccccccaccccaccacagtccccagagtgtgatattccccttcctgtgtccatgtgatctcattgttcaattcccacctatgagtgagaatatgtggtgtttggttttttgttcttgcgatagtttactgagaatgatgatttgcaatttcatccatgtccctacaaaggacatgaactcatcattttttatggctgcatagtattccatggtgtatatgtgccacattttcttaatccagtctatcattgttggacatttgggttggttccaagtctttgctattgtgaataatgctgcaataaacatacgtgtgcatgtgtctttatagcagcatgatttatagtcctttgggtatatacccagtaatgcgatggctgggtcaaatggtatttctagttctagatccctgaggaatcgccacactgacttccacaatggttgaactagtttacaatcccaccaacagtgtaaaagtgttcctatttctccacatcctctccagcacctgttgtttcctgactttttaatgattgccattctaactggtgtgagatggtatctcattgtggttttgatttgcatttctctgatggccagtgatgatgagcattttttcatgtgttttttggctgcataaatgtcttcttttgagaagtgtctgttcatgtcctttgcccactttttgatggggttgtttgtttttttcttgtaaatttgtttgagttcattgtagattctggatattagccctttgtcagatgagtaggttgcgaaaattttctcccattttgtaggttgcttgttcactctgatggtagtttcttttgctgtgcagaagctcttgagttgaattagatcccatttgtcaattttgtcttttgttgccattgcttttggtgttttagacatgaagtccttgcccatgcctatgtcctgaatggtattgcctaggttttcttctagggtttttatggtttgaggtctagcatttaagtctttaatccatcttgaattgatttttgtataaggtataaggaagggatccagtttcagctttctacatatggctagccagctttcccagcaccatttattaaatagggaatcctttccccattgcttgtttttctcaggtttgtcaaagatcagatagttgtagatatgcggcgttatttctgagggctctgttctgttccattgatctatatctctgttttggtaccagtaccatgctgttttggttactgtagccttgtagtatagtttgaagtcaggtagtgtgatgcctccagctttgttcttttggcttaggattgacttggcgatgcaggctcttttttggttccatatgaactttaaagtagttttttccaattctgtgaagaaagtcattggtagcttgatggggatggcattgaatctgtaaattaccttgggcagtatggccattttcatgatattgattcttcctacctatgagcatggaatgttcttccatttgtttgtatcctcttttatttccttgagcagtggtttgtagttctccttgaagaggtccttcacatcccttgtaagttggattcctaggtattttattctctttgaagcaattgtgaatgggagttcactcatgatttggctctctgtttgtctgttgttggtgtataagaatgcttgtgatttttgtacattgattttgtatcctgagactttgctgaagttgcttatcagcttaaggagattttgggctgagacaatggggttttctagatatacaatcatgtcgtctgcaaacagggacaatttgacttcctcttttcctaattgaataccctttatttccttctcctgcctaattgccctggccagaacttccaacactatgttgaataggagtggtgagagagggcatccctgtcttgtgccagttttcaaagggaatgcttccagtttttgcccatttagtatgatattggctgtgggtttgtcatagatagctcttattattttgaaatacgtcccatcaatacctaatttattgagagtttttagcatgaagggttgttgaattttgtcaaaggccttttctgcatctattgagataatcatgtggtttttgtctttggctctgtttatatgctggattacatttattgatttgcgtatattgaaccagccttgcatcccagggatgaagcccacttgatcatggtggataagctttttgatgtgctgctggattcgttttgccagtattttattgaggatttttgcatcaatgttcatcaaggatattggtctaaaattctcttttttggttgtgtctctgcccggctttggtatcagaatgatgctagcctcataaaatgagttagggaggattccctctttttctgttgattggaatagtttcagaaggaatggtaccagttcctccttgtacctctggtagaattcggctgtgaatccatctggtcctggactctttttggttggtaaactattgattattgccacaatttcagctcctgttattggtctattcagagattcaacttcttcctggtttagtcttgggagagtgtatgtgtcgaggaatttatccatttcttctagattatctagtttatttgcatagaggtgtttgtagtattctctgatggtagtttgtatttctgtgggatcggtggtgatatcccctttatcatattttattgcatctattagatttttctctctttttttctttattagtcttgctagcagtctatcaattttgttgaacctttcaaaaaaccagctcctggattcattaattttttgaaagggtttttgtgtctctatttccttcagttctgctctgattttagttatttcttgccttctgctagcttttgaatgtgtttgctcttgcttttctagttcttttaattgtgatgttagggtgtcaattttggatctttcctgctttctcttgtgggcatttagtgctataaatttccctctacacactgctttgaatgcatcccagagattctggtatgttgtatctttgttctcgttggtttcaaagaacatctttatttctgccttcatttcgttatgtatccagtagtcattcaggagcaggttgttcagtttccatgtagttgagcggttttgagtgagattcttaattctgagttctagtttgattgcactgtggtctgagagatagtttgttataatctctgttcttttacatttgctgaggagagctttacttccaagtatgtggtcaattttagaataggtgtggtgtggtgctgaaaaaaatgtatattctgttgatttggggtggagagttctgtagatgtctattaggtccgcttggtgcagagctgagttcaattcctgggtatccttgttgactttctatctcgttgatctgtctaatgttgacagtggggtgttaaagtctcccattattaatgtgtgggagtctaagtctctttgtaggtcactcaggacttgctttatgaatctgggtgctcctgtattgggtgcatatatatttaggatagttagctcttcttgttgaattgatccctttaccattatgtaatggccttctttgtctcttttgatctttgttggtttaaagtctgttttatcagagactaggattgcagcccctgcctttttttgttttccatttgcttggtagatcttcctccatccttttattttgagcctgtgtgtgtctctggacatgagatgggtttcctgaatacagcacactgatgggtcttgactctttatccaatttgccagtctgtgtcttttaattggagcatttagtccatttacatttaaagttaatattgttatgtgtgaatttgatcctgtcattatgatgttagctggtgattttgctcgttagttgatgcagtttcttcctagtctcgatggtctttacattttggcatgattttgcagcggctggtaccagttgttcctttccatgtttagtgcttccttcaggagctcttttagggcagtcctggtggtgacaaaatctctcagcatttgcttgtctgtaaagtattttatttctccttcacttatgaagcttagtttggctggatatgaaattctgggttgaaaattcttttctttaagaatgttgaatattggcccccactctcttctggcttgtagggtttctgccgagagatccgctgttagtctgatgggcttccctttgagggtaacccgacctttctctctggctgcccttaacattttttccttcatttcaactttggtgaatctgacaattatgtgtcttggagttggctcttctcgaggagtatctttgtggcgttctctgtatttcctgaatctgaacgttggcctgccttgctagattggggaagttctcctggataatatcctgcagagtgttttccaacttggttccattctccccatcactttcaggtacaccaatcagacgtagatttggtcttttcacatagtcccatatttcttggaggctttgctcatttctttttattcttttttctctaaacttcccttctcgcttcatttcattcatttcatcttccattgctgataccctttcttctagttgatcgcattggctcctgaggcttctgcattcttcacgtagttctcgagccttggttttcagctccatcagctcctttaagcacttctctgtattggttattctagttatacattcttctaaatttttttcaaagttttcaacttctttgcctttggtttgaatgtcctcccgtagctcagagtaatttgatcgtctgaagccttcttctctcagctcgtcaaagtcattctccatccagctttgttccgttgctggtgaggaactgcgttcctttggaggaggagaggtgctctgcgttttagagtttcccgtttttctgttctgttttttccccatctttgtggttttatctacttttggtctttgatgatggtgatgtacagatgggtttttggtgtggatgtcctttctgtttgttagttttccttctaacagacaggaccctcagctgcaggtctgttggaataccctgccgtgtgaggtgtcagtgtgcccctgctggggggtgcctcccagttaggctgctcgggggtcaggggtcagggacccacttgaggaggcagtctgcccgttctcagatctccagctgcgtgctgggagaaccactgctctcttcaaagctgtcagacagggacatttaagtctgcagaggttactgctgtctttttgtttgtctgtgccctgcccccagaggtggagcctacagaggcaggcaggcctccttgagctgtggtgggctccacccagttcgagcttcctggctgctttgtttacctaagcaagcctgggcaatggcgggcgcccctcccccagcctcgctgccgccttgcagtttgatctcagactgctgtgctagcaaccagcgagactccgtgggcgtaggaccctccgagccaggtgcgggatataatctcatggtgcgccgttttttaagccggtccgaaaagcgcaatattcgggtgggagtgaccccattttccaggtgagtccgtcacccctctctgactccgaaggggaactccctgaccccttgcgcttcccaagtgaggcaatgcctcgccctgcttcggctcgcgcatggtgcgcgcacccactgacctgtgcccactttctggcactccctagtgagatgaacccggtacctccgatggaaatgcagaaatcacccgtcttctgcgtcgctcacgctgggagctgtagaccggagctgttcctattgcgccatcttggctcctcccttaacatcatttttgaggctacataacattcagtgacctgggtgaatcttcaattacataagcattcccttttgttgaatgtaatatttttataagctgtcaccattacaaattagtggttttcatttcttattgatcacaatccttcattgtctgctgttaaacatcttaaaatggttatttcttatattttctccagtattatagttatttatataacatgaaggctagttctgtaccagttactccatcatggctagaagcagaagtccactatgcttttattattattttttagggtactgttttacctcatccttgtgtaagtagttttgtttattaatccaatgtgagtctgcctagtattagagagtcataaagctgatgtgctttttgtcaaataatctcgtatcttaggttctagaggaaatgatgtaaataaaggtaaactatgtgaaaagtttcatttttataatgaaatgtcgaaagcagcccaaatagccacaataggtaatagttaattaaataataataaattcacttgatgagatataattttgcagactagcaatgcagtaaaaatacttcagacaaaatactaggttaaaaaacaaacaaacaaaaccccactgaccccattgtatatgcaacggtacgttccaaaattaaacctaaataaaacatactcacatgtccaaaccgtgagcaagaatcccccaggcttgcaaaattcattgcagtgtggcaacaagtatcatcaatttttttttcttttttttttttggtgggaaggattttcataccttttggtaaagtttgttgtatatataattaaaactcgtgtttactggacagataaaatatttgctaaaaaatttcaagtatacacagttttagacatttcttgtatatattggtcattagaacctcctgtgatcaatgtccatttagctaaactttgacttttcttcattgtctcaagaaaatgttgcttgctgtcacctttaatatttctaacaccacatcactgcagacgtcatgccagttctcctgctcagaagcttaggactttagcctatatgatctgcttagcttcattaaaagtattttcttgaatcacatgtttacagtttcatagaaatgttttaatttacctccagctgttaaaattaattgccagtttgcatcattcaatctctgaattttcatttgtatgttatcatacactacctaatgttttgtatcctgtgttttactaaatatcaccttatgatcatttcccagcatcattagagagttgctgtgtttaacattagtgttctcagggtagcaaatgccaagacaagattaaacatgcaggaaaagtaggagggtaaggcggagaggaggaagggagccagtgacagggtgggggagccggcagacctaggtgcgggtctgaccccagcgaaggggagggaaggaaggaagctggacggaaacactgtggcctgcactgcgtctctaaggggagctgggcagggctgtcaggggcccttagagccacagtggcctgtcagaggatcctgcatctccaggagggggcctgctttcctagccctgccagactcagtcaccgctgggagcagccccagggagcacaacttcacaggaacacggtagattttacagtgcagagcttggtccagggtcagttacattccctgcagtcagagatacgggaagtgcattctcatagcccccacactttgtaaaaatctttagtgcacctatgcacctaccattctatcttaaagctataccatattacaagtaattcttctgagtaagccagaaactcagaatcttccttgacaacattctgtctctcttacctccatagccaaaccatcaccaggccaaatgaatttggtctctcccatctctcttagctctgacactttatattcatctttagtaggagactctaataatcacccatccccacatcgtatcctgcctttttagatcacccgtgccaccctccagtggctgttttatcatattgccagagtaatttaggacagaaggcaccaccatatttatccctacccctttcatccacttttggctttttgtagccttttgggtggtgtgaaataatcttggcaattcctgtagtgcttcagttcacattatgctccccactgttgtctgtgctccgcacactgtccactgtgctccccacactgtgatgctccccatgctgaccgctgctctccacactgaccactgtgctccccacactgtccactgtgctccccacattgctgtgctccccacactgactgccgtgctcctcatgctgactgccatgctccccacactgcccactgtgctccccacactgtgatgccccccacactgccgtgctcctcacgctgactgccgtgctcctcatgctgactgccatgctccccacactgcccactgtgctccccacactgtccactgtgctccccacactgtgatgctccccacactgactccagagcttcacacactgaccaccttacgggtccacactagccagctatatcctcccacttcagccatactttcaacacacttccttcttcctagactggtccttcacaccctcttcatcaaagtcatttacacacagctttaaggccacagcttgagagaactttattcaaggatccttccttgacactctgttgaagtcatattccttgcatgtgacctcttgcaggcccacatttctcatcttttagtgtttattgtaacttcagtttccccttttttgggatttttatgttactatagtttgtaatactcgatactttgctatgaggacagtgccttctgtttatttttgctcagcaataacatctagtatgtgtgtattgttgaatggataaggggcctcagtataaaggtgtaagctgagatacaggtatgggaacagttacagttggaggtatacgaatggacgtggtccccaaggtaaaaagggcaggaaggaagcatcacccgaggtgaacacatgtgtcctgcattcacttagggaagatagagcatgtttgaaggcacaaaggggccaacagcagcatgcattgcaagattcacagtagttctgaataacctgaacaaggagctactaggggcagggctcaggaggaggatagaagtggaaagaaacctgaccatcaagtattttatatacatgttgagtgatctggactttatatcaaaggctagtgagaagccctgaaaggttttaaggaggaagaggcctgagcagatttgcctttcagaaagatcattccatcaggaatagggaagagaaattggagggggcagaccagagccaagaagcccccaagttgctccttagtgaccccggcaggagtgaggacagcgggagctacagtgtcgggaaagggaagctctagagggtgcagcggcagagttatcaccgagctggaggctgcggcccaggagaggacagaacgcaggaggcacagctccaagggatggagcccaagaggggcctctggatttggcaagcattcaaatctcaactttctctgtgagcaacagacaaacttcaccttcttcaaaatagcaccagcaaggaaacacaatgacttctttaccttttaccgaaatgtgtccttcagctttaggagcagcagtcaggaaaggaaaagagaacatctatctgactagctggccaggaaaacacagcctctgatcagtgcaccatggtgggcacagacaatagactcatgttcaaaatatcacacgaggtcttgcacactccttctagatgaacagatgaaatcggatccagaaatctactatgggcttagaataagcactttgccctgtgacaagatatcaagtaaagctttatcaaactacatagaattctttccagttttgaaattaaggtagctacctttattctttcaaagacttccttaagcccatttttatgaagaagagggaacttttgaaacaccttatttccattctttgtgattttacttaggattcatggatggtagttctgttgccttagtataatttaaggcttatttcatgtgaaatcaattggataataatcacttactgagtgatctgaatatacactatatgccaggcactggcctagatgacagaaatgcagatacttcatacaaaattgtctttgccttctgaatttcagtgatttggggaaaagaatgcacatgtgaggtctgtgtatataaaatacacaatcagagcagatctagaaatccaagtgctatggaaacacaaaggagagagcaactttaggggaaagcgagagatttgcaacagagatgttgaaaactgaattgatgccaaatggtaactaaaggtttaccagagaaacacaagagaagggctgggggcagaggaagcagggtttcaggcaagagaaacagtgtttaccgtaacacgaaaagaccaaagaagttgacattattggggaacaagtgagcaatttagtacattggcgtgcaaaaagagtgaagggatggttaaaaagaaaaaaggaccctttaagacagtcgttaagctttaattaatcacacacatgtaaaggagtggggaatatcacacaagcagacaagtccgtgtgcaataagacgagcacggagacaggggagagagaaaagaacaggaaaggtgaaagcatcttgagcttctgcagctatagtcagctccctgtttgctccactgatgtgaagaatgcatgccccattcccagtgcctgctgctgagaaagtcacgtgcagtgcagtgagcaggctgaccaattgccaaacagtgcaccccccaggggaatgctgcagagccctaaatgataaccagctgatatgggtgatctgctcaggctttttgtgcttgtctgagattggaggacttataacagaatagttcctgtctgtatccattttgaggcttactcttcttgaattgctgtatttactttttatatctttctaaaagtacagagattattgaaaactacaatttagtatttgcaattattaaaatcatagtggcaaattagactataacttgtaagttttcgatttttgaaatatctaaatattaagatagatttaaaatatctcaaagagaaaaggcatgctgtttgccatttgacagtaaatagtcgctaatcaatattctcacattttaatgctcagcagattctgacaacttgactagtaatgagttaatatattgttttttataacttcattaataagaagtttgtagggtagcatatttctatctcaactatccccaaaatgctgtttctaaggtcatgctcagttctaagaatccataaatgtgcatgtgaatagaatcacaaagcagcagcatgaaaacttatatttaggggaaatgtttgctgattccaactttcaatgagttttatttgggaattttacagataatatctttaatcaagtgcatggtctatgatctgtcaatctcatgtgtgtaagtaaaatcaaagttcatcagatctgtattaaacaacttatttgtgttcataaaatatgtgtagctttatagtgagtcttgttggctttctaatgtgatagagtaggcatgcatagattaaaactatgatatagtgaaatatataattggtcttcagcccatttcctggcatagggctcctaaaatccttagaatctccaaaatgatatccttttttatgcaaataaatcaacagatggcagaggtagcttcagaaaggagctggtcactagaaagaccaaagcatgactagagtgttggaactttcagccctacccctgaacccagggaggggagaggggctgagggttaagttgatggccaatgcacaatggtttaatcaatcatgactatgtaatgaagccttcataaacccacaaaaggacagggctcagggagctcggaatagctcagcatgtgtaggttcctggagggtggatcacctggagagggcggggaagctccacaccctttcccccatatcttgccctatccatctcttcatctgtattttgtgtaatatccttgataataaaccagtaaacttaagtgtttcccttagtgctgtgagctactctagcaaattaaccaaactaaagagggagttgaggaaactccagcttgaagctggttggtcagaaattctggaggccgagacttgcaaatggtgtctgggggagggaggagacagtcttgcgggcctgagcccccagcccaagggatcggatgccatctccaggtgaacagtgtcaggactgaatcctaggacacccagctggcatttactacagaattgattgttgcctattggtggggaaatcccccacacatttggccacagcattttctgtgttgactgcggcggcagtggggtgagagcggaggaaaatgctttgatttttccctaacaaggaccaatctgatagatccccacctgccactgaacctcctggtgagcacgtgtccagctgcggctggtagattgtgattcacagggaggtccacttaataaatgcccagctctctctcctgtcctctcctgtctccttgcctcccttctgcaccctggccacagcttccccagctcggctcctgctgtctcttcacccacactatgatctccttcattcccacacacgttctcttctctagaggactgaccttcaaaataactcattcacatttatcccaaaagaattctgaaaaatggtagtctcttagagatctttattctggcatctaaaatgcatgtttatcatagttgcaagcaatgtaatttctagtgaaatacaaatattgacatttaaaaataaaattatttttttcactctgttaattgtatccagccagttcttagtaccattagggatctgattctcaccatcagtcattttaaaaatacatgaatttgcttttctttaattgccagatttttatgttgttcttttatcccccttgaaactgtattttcatttcactctcctctcagaatgttttcctaatgtaactttttattctgaaaattattattgattattatatgatatgtaaattaatttaaacattaaaaaatttcccataaccatgtgtccaagaatttaaatatatttaaaatgtgtatttatacatagacaccactttgaaatggtgtccatctacctatcttatgtaagagagtgaaaagtatagaaggaaaaagaaagaaaagagaaaagaaaagaaaggaagggagaaaggaagggaggaaggaaggaagggaaaagagaaaagaaaagggagggagggagggagggaggaaggaaggaaggaaggaaggaaggaaggaaagatggaaagctccatcctggataaattttgtcattagaagtattactaatgcataactttcagaacacctgttgttaaccagcaggcttgtccacaagtaaatctgaaccatgatgactctagaacccagggcttgatccttctccgtctcagaggggctacaattcaatccagtttttttgtgatcagcttcccccagaactggtgattgcctccatctgactagagtagggtggggtttaagtattcctatgcgtccagggtcctcaattctgggcatctttctcagacaactcccagaaggaactggcaccagcactactgacccccgggggccagggtgctgccagcagcagaacccccagcgcaggctgagaggctaagacgcgcttctgtgggatggggagcctccttctcctgcgggactgtggaatttgtcctgaaccctggcaggtagagaccacaaagggacctaccttgcatgaaaaacatagatgtattacaaattgtgataggtgatttttaagcataaaagtaacattttgtatgaaattcatctcttgatagtccaggcttttgttttcaattggtccatacatgtggctgaatactaatttattgttagataaaatgaggcccagcattaatttcgagcctatgttttattttatagaaggaagcacaagaaagccctgttataataaagcagatgtgaatgaaaggaattttaacaatgtgactcaattctttgaacttatcctgagaattatatgccaacaatcacatagcaattcattaatcaataattctttttagtgatctcatcactgataaactgtcgggtctgccttcaattttcttgaaagccaaaaactagaaactgcctgacttacaacaggatttgctgcccagccgtcaaagccattccccttctcaacaccgtcaccaacatgatttcaaacggagcctgtggcctggtgacctggggccttgcagccagagacagtgaactgtcaggtttgggatggatgagagatttccttcttttgtaaagcggcagaactattgtgaaaggggagtagagaaaagagaacaccaggggctttcctgagcagatcatcactttcagaaaagagtacactgaacgtttaaaatctggaaattgaactccttaaaattatttgcatttgggtgctccttggaaagcctttgtatgccaaagctttgtgtacccagtataaaaatctctgctccagaatggcttgatctccttggagatcaggcagaaaattctgtcttttgcttttctttgcaatacctggttgaaccactgacttaccgtacgttttaactttcctgatatcctaccattatgtgttactatcagcctcgaatcatcctttcttattattttattcacagaactgtggtgttctcagtccttgtagccaatcttcttgtttttatcacagccttaataagacagaaagaaatatgcatacaaagctatactaccagataacacaggaacagaaaaccaaataccacatgttctcccttataagtgggagctaaatgataagaacttatgatcacaaaggcggaaacaacacacactgaacttagcatctgggggatgtaacagtatgtacaacaaacgcccatgatgcgtgtttgtctatgtaacaaaccttcacatgtacccctaaacctaaaataaacattttttaaaaagctatactaccagatatgaaaccttgggcaaagtacttaacctctttctaagtcttggtttccttgtttgtatctatgtatctacctcatagggttgtcatttattataaagatgaaataagaccatatattcttgaacttagaatattgttgggtccatgctaggtataaatattaactattattattaatatcattagtatcattatacatttaaaatctctaacatattctatggtcaacagttgaaggaaatatattactaatctatgtccataaattttacttcccacatattttgacttaaactatagtttttattttgtatttgccttatatatttagttctcattaacctgctagttctgggagaaggagaccattttctttctgttttttttttttttaattgaatgattttgttttattcatctttattttcttgactatatatagtatcctgcgcatagtaagcattcagtaatgtttgtggaattaaattttgtcaaagcacacattttttatttgtgaaagtccatgagtagctaatgatctattaaactgggaacagaaacttctacctgcatagttccacaaaagaaaaccatctgtgtgtttgtttaaccagtagaattgaaagatgttttgactttgctccaggaattagagttccatgtgacctccagataatgctgtctgacacataatcaggcctcatagagaaggaattaaaaagcaagcattacagatcctacattattattattattttttggtttgagactgactttatttctctccaaaaagaaattaaagcaaatatttgtgtatgcagttttaaaacctatatttgttttgatagatggtgtaactgacattcattggtatgtacgcatgagagtatgactaaaaaggcctctgtacggctagttataaacctttcagtttagtctgtggctgtaccagctaggcctactatgaattgtgtttgattctgacttcacctaaatgagcctgatgacacgtgtgaaaagccccacttcgctggttttagcacagctgtcccttcagcagaccgtgacttgccattgaatttcacatgggtagtccctttggaggtgcacagagtccgaaaagcgtttcttccgcccttcctcttatcaccgtatccttgcgctcttcctagagcagccgctgcagcagcatcgcttctacgctgtgccctgcgagcgcgcctggcttggtcgctgctgaagtggctgaatcttaggagcagaggactccccacgcagtctcatgtgaaccatgattccttcgttcactcccagccctgctgttaactagctgtgtgatcttgagcaagctgttgctgccttctcagactcggcgtaagctggagataatgcccagcgctgacacctggtagagctgttgtaaggattaggtggaggagtgcctgtaaaacacttagcaccctatctggcacacaaaaagaacacagtacatgatgatcgtgttataattgtgatttatgacactgatgaaattagtaggaaaagtggtctctgtcagcccttcaggacttcagtttagactaattcctaatcttatagacactcttcttttttgcgtatcagagatgtaagtattgtaaatgtgtcttaaattatatcttattatctgatgaaggaattattatagccatctgtcttaaactgttattctaagaaaaaaaaatggagaaagaagaaatacagagtgagggacttaaaaatattgaaatggctttcaaaataaaataatcccaaaatatggtacgagacaacagagagatcagagaagcaaatagccaggaagaagctctcctgtcaatttgaatgtaacttatgacaagggacatgggaatagatacccccaatcgtcccagcggtgtgtgttcccaccccagcttcccagcgccccaactccctgcttctgggacgtttagtcatgttttctccactggagatgcctccatagggcgtagcagttcctggagcacagtggacactgggtgggagacaggtgatttaactggccttccttgggcaccagtgaacagatgttgttgctagtcagttatggccccttctcacggagtccgggttcaggttctgcccctcatttctcagacagcgtcccaggccacctccacccatgccggactttatgccttccttgaccgggagggccacttatccttgttcaggtccaaagctgcgagttttggttttgttgttgttgttgttattgttgtgtttagagacttggtctggctctgtcacccaggctggagtgcagtggtgtgattacagctcaatgcggcctcgaacttctaggatcaaaagagatcctcccacctcagcctcccgagtagctgggactacagtagtgtgccaccatgcctggtaattttttaaattttttgtagagatagggtctcactcttttgtccagtctggtcttgaactcctggcctcaagctatcttcccacttcggcctcccaaagtgctgggattataggcatgagccaccgcacctggcctaaaactgcattgtgcatatagccgtggaagtgctgaattgtattgttatcgggtactttaatagtgatacattcaaccggctgtgtggccttgggagagtcatttcaacatgatgaaggtccaagcccaggagatgatcagagaatcatcccgagtctcctgcagccctggagcatcttctggtagcaaataatctaaacaggtatcttaataggtgagcggcacgtctcgaagaaaaaaatctctccacacaaatggtaaaggtcttgaaggagcaccagatctgtagcgtgtgcagcaccacacttttcatatatgatgtgattagtgtaaataagtagttgattttgcttcataagtcaaatgatgattcttttacaaatagccgtttgaataattctttacacctgctacttagccatagttttgctggaaggattgagttttcttctgaagacacagcactactctgaagcttatttccccctgaattttgtttttcccatttttggctgagaaggcatctggagtgactccagcgggtttacctaggttttccctgaagaggtttaggtgattagacaataacagaaggaaaagtagagttgccagtaggtggctcactatgaatgtgcttgggacgggatcagacatgtcacccctcctccacttagcctttgttttcaatccctgctgctttgagcctttttctataatgtctgagtcatttgcagcggggtgggtaaagaggggagaaagaagaaagcaagcaagcaacagcctttgagctccggaatagcaaaggcccccatcttgctccgagagttcacagagtatagcccagtccgagttctcttttccacgcacacttgcttgttcttttgttccttgtgtccttggcaaagactgaaagaactaagcctggaatacttgggccctcccgtgtcacttaagaaataataagccattgtcctcattaagccacccttgttttagcaaatagaatccagataccggagagggaacattttgaagggaggcagaattagagtagagatgctttacaaaattccctagagaaactgctttgtttctcctattttattgctccttactgagaagattcatattcaaatgggttggggttgtgaatagcggcttgcacattctcatgcacccaggaaggctatgattatggctaattacaatgaagaatgaagctctaacaagagtgttccatcagattgtcattcatgcatgaagtaacttaggctggccaatggaggtgtgattttggtaattacaaacaatgtggctatttgaaaaatgcttagtaaatctgttcaagacaaaataaggtctaattaatcactttagctctgaattctccagatgatccatttgctctgtttttttttttttaatttaaggtctctttaataaactagatctaagatataaaatatgttctcgttgcccacacttaaatgcaactgtgttacctgtttcaaaggcttcttaattctgccaatcatgttgcaacctgcttttaatgcaacttgacagaaggcttttaaaaataaatgtgtgtatattcttgttgttacctgacaagaaaatggtttatgaaaagttactgtaaaacattaactattaatttagaagccatattggtatcatcattgtgctgacatatattaactcttgaatattcggtgaatgttgtgtttagcacttaagtaatgtctaactatatgtattagtttgttttcacactgctataaagaactacctgagactgcataatttctaaacaaaagagttttaatttactcacagttccacatggcgggggaggcctcaggaaacttaacaatcacggtggaaggcaaaggggaagcaaggcatatcttacatggcagcaggagagagatagagaaggcggaagtgccacacttttaaaccatcagatctcatgagaactcactcgctattatgagaacagcatgggggagctgcccccatgatccagtcatctcccaccaagtccctcctttgacccatgggtataacaattcaagatgagatttgggtggggacacagagccaaaccaatcactatattataggggagaaaaagtaatatattttccttacctatcacaaggttcgtggctgagaaccttagagcaaaggacagagtaacaagagaaaaacatcacatttatttaatagaggttatgtgacatgggagccttcagaaatggagacccaaagaaacagagatgtgtgtacttttatggacaggcatgcagaagtaagactggaggatgaaatggcatgctccaatcggtacaaactgggggcaactcagggagacctgattgcccagtttcttctccgtgttcctgagtgacattccttccctcctggtatagggcagtactcctgtcacatgaggtcttcagggaagaagtgaggccgcaggtcaaagagtggccttccctgcggtcatggcctgtttcagggaagaaggggtggagggaattctagtttccatgcctacttcaggagacagaggacaggaaaagtcacagagaccctcctgcttctgcggcgttttccattttcttgagcttaaaacagtacacaaaggtgctatattttggagtatcatgttctgaaccccaaaaatattctaccttaaataattggaggcctccatgaaggcacaatgatgacataggaacttatgcctctctatcattttttttttcagtagatgattgaagcgaagctgttttatgcttgtctcttttcccgtttgccatttttgtacctttgttctctcacctaaaaatagactaataaatggccagagttgttgcaagaaatgtacaatgataaaaacatctaattattggttttaaatgcatcaatcttcaatttcttttaaatgtctactagaatgaaatctgcccaactatctgaggagctttgttatttttaacttatttggtttctatacatgaacccaaaggaactaccttttcctaattgaattagcagggctagaaattcaactcagcacacgtttaactgaggagtatcagggttcagaacacgctaccccaaaatgtgacacctcggaggtcactctctcaccttctccctccctcctttccttcatcttcctttctcccctgaggaggttcatagaaaccaaaatttctctttgccaaagcaaaccataaaacctagaaaggccactttctgaccttctcctttctcccctgaagaccctcaagtgataggtgtcttgccctgaacagaaaggccaagaagaagctaaacaaataagccttgcagagtcccctcagtttagtacattaggtcgtaccccctttttgtccagtcacatttctatacaactgtacatttttcctggaacctatgcaaaaaaattacatagtttttcctgggtctttgggtcttaatttcagaaggcaccttcctgtgtcacagaaaacttttgttacataaatttttttatgcttttctcttgttaatccgccttctgttatagtagtctccgccatgactcttgtagctggtgaggaaaaggtattattttttctcccctacaagagtaatggattttacaactttgactgttatactttctaaaaaatgggtttagcagggaggtgggggtgggggagagagaaggaagacacaaaaaaagactagtttttatacagatattttcttattttaactaatttatatcatctataaagggaagcaaatattaacgttattagtttcctcaagaggataactaaagaaaacattcttgtaacaggggaagaagtaattccatacctattgtatctatagagctgtgcatttcatgtctctaaaatggagtaatttaaagttaaaaggcctcttctagtagttttcaccaaatgaattttatatatactgaagacagataaaataaaaatggtacagaaaaacgggagttttagagtcttgtttcaattctttagaaagtaagttgtctagcagaacatgccaacttggttgcctaagagcaatgtaaacttgagtcccactcgccatgttgaattattcttgtttctatttagcaagtggtctggagtctttgatctgcaatgtgtgtagttaaaatcattgtggctattattttatctgcccaaaatacagattttctaggatttgacagtataaagcatttgctttaataagttgagatttaatatttaatggtttctctcaaattcctgattggtcaatgtattgttgccaatttgtaaatttttatcaaaggtacaaatttgaaatgttttgctgtatatcatggaagagaagccatgattatgttccctaagcaagttacggaggcttagagtggataattattctctccttgtcctggtactgcctttgaagaatttccatgttgagggtaagagaagatggtttaaaaacctgatgaatttaggtagttgcttgagagaatgagtaaagtccattttttccctgattaaaattaagtctgttagttgcttttttgctcaccaaacacatcaatacagatgcagataaggtgaggcctcttcctgtaaatcagctgtcaaggcctatcggggagaaaaacaatggacaaggaggcaaactgcttctcatgaaggctgtgcgcttcttgtttgcaagaagaatatttatgggcttcacagctggcagcaaagaacatttaaatatataacttcatacacatgcaaagcattttgtagattaaatcagctcgaagtgtagaacctgagagggttaatagaatttcttggtaaccatttaataaaattaatgtgctattagtctgatgtcttaattcaattggctgatatatattcccagttttcactcataggtgagccttagaaaaagttagtaaagattgttttaagattgccaattttctaagaatgggaatacaataaaatgtaggtaatcaaaatattgaatctttgatctaggatctgttaggatagcaataataggtgcatatataatgtcttgtatattcctcaaatttttattatttcctttaacttccaaaattaagaaactgccagaaaagtatggcaggtgttcttagctacctatcaaagcgaaagcaactgagaccctgagtgaagtcgtcaacacaaggagcaccacagagggaacgtggaagctctaagcaaaacccacctccctctgcctcaccacccacctctcattatacacatctatttccatcgcatcgtggagatgcagaggtgctggcagaaagtcttgggtacttaactgttggataaatcttttactgaatctcttaaagttatgctcactataattgttggtgaaatcactttagatctctgttgtaaagctctctaaatttcctcttccattggtgttcatagtttatgacctgtcccactgagatgctactaagggagtctgcacagagtgggatttctgtatctgctacggtctgggtatttctgtatccactagggtctgggtatttctgtgtctgctaaggtctcagcatttttgtatccactaaggtcttggcatttctgtgtcagctgagatctttggttttaggcgacagaactcctctctgtctggcttgaccacacgttggtcagaaagaggctgtactgtgctccctctaggacagtccacgggaactcagaggactgaggaggtgactcaaaagtttggaaggtgtttcaagatttagaaggcaggattcaggtagccccagagagtcttgggaatgaattccaattcccccttgtaccacctttcacgagactccggattataggggcgaaggagaaagacgggcaaagcttctgtcatgtcattacactgggaagtgagagggaagtgctggctgaacctcttgggaccccctgtatactctgtggtgggggagaggggaagcgtctttgtttaccccctcaatactttatacagcagaagaaaggagatgcctgaaaaggcaacggggatgcatttaggaagaagcaattgatgctaggcacacaagaaatgctgcaacatctaagttgtacctgaagcagaatttcaatttaatgtgccatgtcaaggtggccacagagccatctttataaactgggagtatccacatattccagactcagagagcaaagatccaggactagtacagaaagtcactccgtataactggaaaagcttgcttgtctgctttcagatacgtttctcaaccctcatccataacacgatgctgtaaaccctagagtaagacagagataaagcatgtgctgggatgaagagagccactttggggaagtgccaccacatcccaggctgcaaggcatctctctctgctgcttgtgcagactggctggggtgagctttggagctggtctcatctcgaaggcaggcgctgctgaggcctctgtgcccttttgcctgggttagatttggcttcaaaattaatttgaaatcatttaatcttgctactctcagcaggtcagtgattaacaggaaattcagtgcccatgttggtcctgtttatgagcccaagtctatgtcataagtaaaaacaggcttaaacacatcaggaaactactcagtatagagtggaaaaagcctgggctgggcttccactcaagggccctgcacacactgcatccacaggccctgagggcagcccctgggcttcagccgtctgcgtgcactcttgtctagtaccgtgcctgatgtgggctatgtgctctactggtatttgttgagcacatcatcaagttactacgtgaataaacatcacttatctgggtcttggtttcccccatttgtaaaaccagagagttgggctaggaaacttttgagtccctccagcgcagtgattgatgtataacataatcagcaatgttgaactttgaagagaatacaagccttatgttgtcactgatatatttcagaacaccttgttactatttgtaaggatgtttgagaacatgtgggcaaatgcatctattttttcttccctaaaaggtaaacttgtctcctttacaaccaaacaaaagaggatggcactgcatagcagaggctaagctacaggctgggtaccactgagcagtggagtaacccaagtttaaacttgaaaccacatttgtgcaataagcaaaagcttcacatttatagaacatcgatgctgcggcacagcaggctactttcatatgtgttatttcattaaatccttaaaacttcaatgtcgtatgtatgtattatttaataaataaggaaccacagactcagagagtttacttaatttgcctaaggtcacagaggtaataaatggataaaaccaagatttgaatataggtctgaataaattattcatgctctcatacctacctatttaatgttatggagttgtctacctttctgcttcatttttctttatatttttactctacatgatccttattttgaggccttccattgcttgttctccttctcttgattcctgcattatttcctttccaacatgtgctttgatgcatctgttttctctatggagccaaggaattttccatcctctcagttttatgggaagatacagaaattctctactcattgagtcccaatgacaatctaattatttctaaatctcaccgtccaataattatctttttaagctcttcctctccctctgaattgtgtggtgtgttccctgttgacatttgattaaggctttgcccatgctgcttgaataaaaatatttatatttcaaaatttctgactgccaattatccatattttgatgcttaatgtccataatatcacaatttgacatgaaagatattcttaaaaatcattttattatagccacagagtagagttggaaaaataactctaggataaacaaatacatacttattcattccatacctgcttgatgacctactatgtgccaggccttattctaggtgctcacacatagcacctagaattctgttgatcctgggagtttaacgataggcaaatagaagtacaatgagacagatgacagatgttctttcttcctgcctgtctacctacttgtccatccatcaatcttcatgagaaaatggactcaagattttgaaaacctcaaaatgcttccttttgttctagcccttgctttcacgtttaaatgaactctcagtgttgtatatatattttagaaagtttaattttcactaaaataaactttcagtctctacaagtgttgacatttaactccaagaatactttagttggttggaaaatcatttctggtaaagacttcattgtagagaggagacttctccacctctgattactcctacaccttgactgagtactgactacatgtactagacgtttgttgtgagcaagtttcatatactattttattgtgttcccactactgacctataaagtatgtgctattatattttgtttcatttcctgtccaaagaatatttttttaaccaaagaatccagtagaaatgcctttagacttacatagtgattgttaggagaatgatctatagctgttcggagtttgcagaacctcgagtgaatctttcaccaattactaaatgttaaccgaacatttgtgaacatgtgtaatatactccctctaggacgggataaaacctcaagaaacctaggaaaatggccaaattcttgctctggactgcggctctcaatgataattggcatatactggttatttaagacctcacagctgctctggtctgaatgctatttgagatataaaattgtgggctatgtatgcaatctgccttggctcccataaaattaagaagtttaattattaatgtatatgagtatgttgagaaaatgatatagttccactgactatgatagtcttgctgtattacctgctgttttaggatatagggatacagcatcttaatataattgacagtaagccttctcattgtaaattaatctgagtgcttcacattgaaacatgattcttttttaatgtatatattaagtttcgactacatggatgccttttaaactttctaaagaagattttaaaaagcttagactgtagctattcagatttataattccactcaactctgctatatgatcctgaaaatgtttaagtacattacatataacttaaattatttaaaagtttattttacacttcttgaagactaagaactccttgaatttatttcacaaaaggcttatcttctccagaataaatttaacttgcctcatgtaattagcattcagaaaggctcgaattaactggaacatagctaaatagaacctttaatttactagattttttttttctttttgctctacttttagagcttgaaatcattggaaaacaaacaaaatagcaaagatttgttttaaaaatcagcctccaaggttagtgctagggtcagtaaatagctagccaagttttcatattacaaacctatatagttatgatttatttaaaatgatgaaccagagatacccatgttttctaatgcatgaaagaaatattacagaaatattaaatatgttatttgctggggtgaaaaaataagctaatagatgttgagaatattttcagcaatgaaagattgaagcagaattgatttcctagttatcactctgaaaaccaagaaattaaatgaacccaaactcatttttaccagagcattctaattaatcaaatggattaacaaatgcatgagtgagggatgaaaaatacttgtgggagaaaaacagaggtgatacttttggtgagagaaattgctcatgtaaaataattttaaaggaagttacacatttattgaatgcagcatatagagtcctgtgcttccggtctttaccaactaatctcccctaggccctaccgtcacccatcccttttccagaaatcttctaaaaacatctccttcttctccaattactctttattataatatttatgattaaagtctggcaacatttatgtgccaggtactatccttactgacatagaaaccctatgagccatagagctcgctcttttgctataacttcttagagttttctgcacttcagatttcgccacttcagatatttcattattccatgtttatttcaagagaggtttaccaaatacacagaagaaaaaaaaaaatctctaaactagaatgctgatttccaattcccctgtttcaactagttactgactttcctacttccaaaacagtttgagggaacttaaaagacacagttacaataaaagcctaaacagaaaagaaagcaggatggagaaagagaattctatcagagtaatcatgctaagaaaagcaaagtgcacccaaccgaaccaaaagataccagagatactcatgacaggaaacttgacaagctccactgtgcatgtttgattaaaggaagtaaatcagtgcatcaggaaagccaaacattttctcttgactaaacttcaagaggtgtttcctctgtggttctttgtctcagagtttgtccatgataggcatggagaaatatttgttgcatggtaaataataaatataagtgatacttagctgataaccagggtccacagcgggaaagactgggcaataggtctccactccttgtcctgcttccactgtgaagttacctttgccagcggctcagtaccaaatgctcaattgcccctgagaagtgtcacctgaatgctccccagtcttctagcccactgaccttggcacccaattaaaacagcttgatccctcctctcacatactatcagaagcctcaggaccctaccttgtgttttgttattttgggttttgttttattctatttttgtttttattccaaactcttgctgtgggaccttcttggatatctctccatccctgttgccatttctccctccacatctctggtaacagatgtgagacttcttggacatcactgtgggaaacacagtggccttcatcccctgcaccctggcttcctgaagggctgtgctggcttctcctccagggtccctaccttgaagccgcttcaggttcctctgtattatgcagagcaaggggactctcctctctccgctcccagactattcaaaaggcccgccatctttgccttattaaaatgtgcattgagatattttccaaacgaaaagaactatccgcaagaaaaatgtatttctcctccagcaactggcccgaactgaaatgagattttaaaatattttctccctgtgacacagacacaccttgatgaaccaggtggctaccctctagggtcctgggaacatctcccagtcagaacaggcccggttttctccagcaagagaagatggttctctaaggagccctcgtcctagaaggcagcgtcgtagagggaaagaaccaggcctggagccaggccgacgttggtttaattcttttctctataacccattactttgctgctggctcttggacgattctcagaacttttcagagcctcacttttctcatcaataaaagggagagaagaaagcttagctttgtattgcaggcgccatttacccttcagggtgacttctcttatgacttttcttattccagacccttttgcattttaagctggatctctcactgaataaggagagggttgcttcaaaggattttcagacacctttgaacaggcagcagagatgcctttgcacatggccttggtgactaggataggatacacggtgttcctagatccagcctggaactagaggcgataggccgccctgaaaggccaatgggctttcaaggtggacagccgtggttttaaatcctggccttttccccgctattactagagcgaccatcagacttttttgacctcagttttgtctctttaaaatggaacaagaattatctaacagacagaattacatcttttagattgtcgtgaggaaagcgcttcccatagtgctgggtagactgggagcgctgggagctgtggcaggccagccgccgcagcacagtggtgagatgcgcggtccacagtcgttcccccttgggagttgttctcccctgaggaacagaggatagggactctgtctgagtgcctggagaggaccccttgctctggcattgagtttcttccagccccgccccatgcaggtgagatccctactcacagcctagggcgcacccgagccgccagagcacagcctcctttccggctcatcacctgcttcctgcgggaggagaatacgcaactccttcgccatgcacatgcgcacagggtctgccgcgggatgccctgtctttcctgtagatggggaattgtttgggattgttacacaatcacaaaccaacactgaatcctactgaaaaaggacacaggctctttgaactctgcactagaacctaaaaccaaattccttttagacctgttctaggaggactacgttaacctgatagctgctgacacagggcagcatgcctaaagctcctaagttagactggtaggtaccgttaattattcctcgttacatcacgcaggtacacagagggacgatgacatgtgcatcctctgctcagaattgcttctgtgctgctggtgacgatggcttcatgggtctttacagaatgtagaggaagagaacagcaaagatttgctggggtttgccactgaatagcagcaaaggcaaatcccaaataacagtggatgtatttcattatcagtaaaatgaaggggctgggctagggcggctccaagatccctctggctcagaacgttccttgatactttgattccatctatgtaacatagcctgaaagtcttagcatgttttctgagattatcccagtagaataccttgtctgcaaaaggctgaaatttattatttgggaataataaatcagaacaaaaaaagatgtagagtccacggtatattattagttttgagtgtactaatccttattttatgagatttaatttttgaaatgtttacctttccattcagactattgtcaggaaaaaaagcgtgatttttgtgttcagggaagaggtaggcaagggactaatgaatatgtgctttgcccttgctctgataaatgctgtagttataaaaagtcgtggcaggttatgggggcccttttgtttaccatgataaaattaataccttacaagttttcaaaggagtttgtaagacgttacagatttatttttaatataatttcagagttggaaagctagacagttggaagtagtgcttggaaagcctgattcttgataaattcattatcaataataccatgtgcagaataaaattacaatttcagcaaagaatattcttccataacattttattattactgtgaaactaattaaacattgtaatctgcaagtaattaaaaatttacctgaaaatatactatgagccctgttgacagtacatggagcattttgtgcgattatttaatgtctgctattttttcttggttgctctattaggaaattgtagtctatatggttttataaaaaggaggcaaattatagactaatggagctagaagactcattaaaagatgatctgcccctgggagattgggtgtcctctttgaaaggcttctgagatggaatggagacattcctgggagcccctcctgggtttggtaccgtggaaatccaggtgactgtcactctattcactattatgtgtccctgcgttccttaagcacattttcacagatgtatttttcacatgcagggaatgcatacaaagcaactagcacactgcttaatgattaccaagcgttcaatgaagagaatcattctactagtattattctttgtgcatggattattacaatactctaacttttttaacttttcactcagagggatattccaatgagactttttattataactcctcattcacttaccagtgtgatttcttgctaccacacgtacatttcttcttttttaaaattcttatttccataggtttttggggaacaggtggtgtttggctacatgagtaaggtctttagtggtgatttgtgagattttggtgcacccatcacccaagcagtacacactgaacccagttcgtagtctgttattcctgacccccttcccatgctttcctcctgagtccccaaagtccactgtggcattcttatgcctttgcgtcctcatagcttagctcccacttatgaatgagaacatatacatttcttctaaatgtgctctggtttatccatatattattggaaataaagccaccacaactgatatcttactttatgagtgtttcttatggggtagaaatttctgatataataaaggccaaagttgtaacatatttattacctttacttcagccagactcacaaaaatagctgcgttgatagctctctcctgatctctaatctcttccttcctccctccttctcttgtttcttttctttcatgcattgaaaattgactggggcaccattttcaatgctggaatatgactgtgaacaaaagtaaaggcctgtggtatcatagaatgttaagttttgggagtgggaaatgacaattagttatttaatcaaggaaaggcataattccaaaaaatgtcaattgctatgagaaaattaaaacgaggtgatgtgggggtggtaacatactctagatgggttagtcagaaaaggctttgtaaacattgtaactgtgctccttttaggaatttcttaatatttatcaataaaagtatgcaatcatacttttgtattttatttttattaagtttgataaataggtgatgtttatataaggcacatatattttatgaagttatagtttgaatgtgattaccattttaaatagcaaagatctgttagttctggtacaaggtatttccccaaggtcttacagaaatgtaaagggttgatactattctgagtgcatataaaacttttaaaactgaagaacattgtttagcactatacaaactatagcaataatttaagatctgccatagtggccttcttctgtgcctcagagaacttggaaatcatcagtagcttatgctaacataaaaatacattaaccatgagttacacattctcatatatatgttttcaaataccagcaatcatttcattaaaaataaaacaagcacttccacttatcttaaagactacttctcggctgggcgcggtggctcacgcctgtaatcccagcactttgggaggccgaggcgggcggatcacgaggtcaggaaatcgagaccatcctggctaacatggtgaaaccctgtctctactaaaaatacaaaaaattagctgggcgtggtagcaggcgcctgtagtcccagctactcgggaggctgaggcaggagaatggcgtgaacctgggaggcggagcttgcagtgagctgagatgtgccactgcactccagcctgggtgacagagccagactccgtctcaaaaaaaaacaaaaacaaaaacaaaacaaaacaaaaaaaaacaaaagactactttctcaatagaatattttaaattcttccaaacactgtaagatatgttttaagattaactaccattttttagctgaattaattttgattctaacaataactacaaaatgtgacattatgttttccatcttatagataaggaggctcaagaacagagagggaagttcagagcttgccaaaaccacagtcatgagagattttaaggaggtggactcatagccagggcttctaactccagatgccctaagttctctatgagagctcagtgctcagtgtcattggaagacagtagacagcggtattgttaggttgactaaaatctggaggaaattggtcacttgataaatgtaattttaaaatatcttcattctgtaaatagattaatacttctaaataaatcttatctctagcagttgagtattagaatgctgtattataaacttacgccaacaaaaattaatgatgttgaattgagaaacaagaaagaagatatttaaatgtatcattaccccacttacttttgtctataagaaattgctcatttccagatttttctttcctactcaagccagccttttggctttctaaaaaataaatacataattagaaaattagaaattagaaacttccctaaaaattgtaataaaacttgtacagattatagaaaacgttcacaggaaagaagagggagggagggaggtaatttctataattggattatttttgtaaaaccttttcaagaaaaattgcaggtccagacacccacattgtcctagcaactaccttggttcccaccatcccaccgctgctcaaggcacccccacctttattctgaactgagtgatttccaagcacagtttgcataaagagacatgaatagagtttcagggaatgagcgctcataggtagtgcaatactttattatctcttataattatactgattttagcttcaaggcctgactgatatcactaggtatcagaatctcaattttattagtacattaaaaaaattactcagttaagaagtaaaagttacaaaaaccagtttaatgtgtaatacagccatttacagtgcacatgtaagcctaacccagatgccagagatgaacgcttagcttgggctttctgcctaatatgtttttccctggaactacaggtattatttatacgtatgagatgtggttatcaagaaataaataagaatactaaattccaagagtagtttggtttttctgtttgtgtgtgtgtgtgtgtgtgtttaggtaactggggtacgtttctggcttgccacatcttcctcagtacctacaatagtgccctgtccatcatagattcctaataaaatacagattgactcattaatggtaggtcacatgtcattattttctcaattttagtggtaggagttatttctttctaaacctttactttcatttactcaacacatatgtgtctgtcttagcactgaatctattgctgtaggtcagcaagacattttaaaattgttcttgaaagaatgctatgaaattatgtaatctggtcaaagtaggaaagcataaaattggcaaaatgtccaaagcaaagcccatactgtaaaaatcatgtcctgatgtcactggaagttgttttgggcatgaaaccagcaatgaagcaaaccaggatgaccctcttagagcccaactagatcctaaatgtcattaaagtcactaaagcactttaccactaaatgtggtaaagattcctttggaaactagctagcttgaaaaaccaattcggcaccaaaactttcagtgactcacatcttatcatcaggccagcttaaaattaatttgatatgctaccctgacactaggcatgaaaagaaaataagattagccagtacatttttgcctaccattcagcaacaaatggaagagccaaataactgcgcattcactcttagattccttgtaactcaagttatcttcttttcaataaacgaaaccaagctacaaacagattttattgcttacaagtgagcagcgcttctgattgtgcacttccatgtcagacctcacattaacaatagtgattatttcagaaatgtgcataaactcaatattggaatgaattgttttacaattgttttgtattccaaaccagacagatcaggcaaaaacatgagggagttaaaaaaaaaaaaatatatatatatatatgtatatatatgctcagatgaaggctagggtatcaaatagttgagtttttttgtaactttacttcctcccctccaaattctgagatggcttaaagaacttttattaataagacaaactattttaatctttcccttcaaactttagctgccgatttgcctaccagtttgtgacttggaatgtccttattttttttatatcatttagggttttgggctagggcttaggtgcctggatccacactcatccatcttccttcttagagtgatagccaggggtctgttcacaggagggcaagaaaccagtggcaaacagaatgccagccaattcaccagactgggaaatgcctagtcagcttcaaagccagatctcctgggaggtcgcagatggaagcacgtgacctgcaccacaaggctgtttgcctctttccctcaaatctctgcctgatggacaccccccaatgtggcgattagattttatcacatcagtgtggggggaggccagtcagaatcatccacaagtaccagggcacagagagaggaaatgaggcatggctcctacatgcatagacacacatgcattcacacacttacatatacattcacacactcgcacacacttattcccacatcacacacaaagtcacattcatacgactcgcacacattcacactcacattcacatcattcacacagattctcacactcacacacccattaacacacttacataaacattcacacagttacacattcatatacacacacacatacactcacacagtcacatgcctccggtcacacacatttacacacattcatacgcccacatacattcatacacatgtatgtattcacacatatgtatattcacacatgctttcacactcacacatgcattcacaccctcacacattcattcatgtgctcacacacatttgcacactcacacatacatagtcatgcacattcacacgcagacattcacacacagatgcacacacagacattcatacacattcacacacacatccacgcacattcacacacacacatgcacacacagacatgcacagacattcacacacagacatgcacacacagtcatccacacacattcacacacacacatgcacacacagacatgcacagacattcacacacagacatgcacacacagtcatgcacacacattcacacacattcatacacagacattcacacacagaaattcacacacagacattcccacacagtcatgcacacacattcacacacaggcattcatacacagacattcacacacacatgcttccttcacctgcaccatctgtgtagtatggtgtttagacatcctccatcttttctcgttaaacattttaaaaactcttagccaaaagtggctgaaagaaatatcatctttattattctgtaagtttttgtttcacataggttgtacattaaccacttgtccttttcctctaagtaacatacagtctatgtccaaggctggttttcccccaaaaattctgctgcaataattgtgtccttgacttggggtcacattacaacattaaatgcatggagttatcaacctggcattccactaatgctccaagttttatgtttaaatagtcttcattagttgtatttccagggaggtcttcttcctccagtatgatcttctaaatgcttactgaccattcagtcttggaaataatttttctttctatttccctggagcttgaactcatgtgtctatctccagttgttctacatcatgcttgtctgaagtgaacagagatgagaaggaaaatgtttatacatttccttccctagatagagccgaagattacaaaaggcctcccagctctgttccttcaccaccccctcctccatgctaaaaccatgcatgcttcccgggtatcactgttctcatgtgggtgcagccatctggagggtagcgtttcaatattcatggtcaccatcatagggggttcctctccaaagaaagcaatgacaagtggaacctcattgtaggtggatttgagggagactttacactactgtgaagctttcttctgacaaggaggaggtcaagagtgggaagggaggccaaggccacaagattccactggaaaccatcactctcttcctgctgtcctctaataatacaggagagaatatggcatcagcaactgccagcaggatccctgggagatcttttctctctttattgtttacatgatatcactttaatattcaggaggctttgatttgcatttctctaattaccagtgatgatgagcttttcttcatgtttgatggccgcataaatgccttcttttgagaagtgtctgttcatatcttttgcccactttttgttggggttgtttgtttcttcttgtaaatttgtttaagtaccttgtagattctggatattagtcctttgtcagatggatagattgcaaaaattttctcccattctgtaggttgcctgttcactctgatgatagtttcttttgctgtgcagaagctctttagtttaattaaatcccatttgtcaactttggcttttgttgccattgcttttggtgttttagtcatgaagtctttgcccacacctttgtcctgaatggtattgcctaggttttcctctagggattttatggttttaagtcttacatttaagtctttaatccatcttgagttaatttttgtataaggtgtaaggaaggggtccacgccagttagaataaagtcaggaaacaacagaggctggagaggatgtggagaaataggaacacttttacactgttggtgggagtgtaaattagttcaactgtggtgaaagacagtgtggcgattcctcaaggatctagaaccagaaataccatttgacccagcaatcccattactggatatatacacaagaattataaatcattctactataaagacacatgcacacgtaagtttattgcagcactatttacaatagcaaagacttggaaccaacccaactgcccatcagcgatagactagataaagaaaatgtggcacatatacactgtggaatactatgcagccataaaaaagaatgagttcatgtcctttgcagggacatggatgaagccagaaaccatcattctcagcaaactaacacaggaacagaaaaccaagcaccacatgttctcactcagaagtgggagttgaacaatgagaacaaatggatacagggagaagaacatcacacaccagggcctgttgggaggttgggggctaggggagggatagcattgggagaaatacctaatgtagatgatgggttgatgggtgcagcaaaccaccatgacacatgtatacctatgtaacaaacctgcacgttctgcacatgtatcccagaacttaaaatataataataaaaaaaagaaaaaaaaaaggaaaatattttccaaaataaaaaaatgtttaagaagaggaaaaaaaattcaggaggcttcagtcagatgtggacttactgggaccaaatatataagacatgttttatatctgatagaaatgttttagggaagacatagtgcaacgttccttggttcagaaatggcatccctcttcttgtcctgcccagaagagtcaatatgcctataacatatcagaagggattttgctttccattaaaaaagtagattcatggtctttccctttatagaattatagttaccaatgaacaagttcctatccccaaactattagatagcaacggtcaccatggtaactaagttgagtgctatgaattatttcttacaacattatttttggagctttacctaaggttatagatagtttcacttaactgggtaaatactaaatttagaatatacctgtgaattataaatagtatgagcaaaaagcataataatattagtagattaaaattctgagacttttttatattaggggaattggaataataactttaaatgtttgtaagatgcaagtgtaagtgtgagatgcaagtgtaaagtgtaagatgcaatatcacaattcacatttttacaacataattaaaaattgacattatgacacagaaatgagatattaaattataacaacagtttttaaaagtcatgtatgtgaataagaaaattattttaaacttaatttttaatgtttcttcactaagtaaaaaaacacaccaatgtagctgtcttgataatgaattcttttttgaataaagtaataatgagaaacattttaacaaataaaatctattttacttttttagagtgtttgatgctgttacaaatattgaatagactgaatctttttctcatctgtgcctgcctatctctgtgtataatgagattgttacttggattcaaagagtgacatcagcaagatggccaactagagccacctgatgctcattcccccaacaaaaggagaccaaaacaacagatggttacccatgttatacattaagcttttaaaaaatagtactagggaaatttgagattgttctaggcctttgagtttggaaatagagctgacacataagggacaaatttaaaaatcctctgatttccccaatatgttgtttctagcggtagtttaccgtgatttgtagtatgttaagatgaatgtatatgcataagccccatgttattctaaatctgaatggagtgaataactatggtgacaagtttaaagatgtcttgcttttcttagtttatcttctagaaatattattgctattatagaatggctctttgtatgtaataatacaatttcagtactacttaaatttttattcactaaatattaccttttctgtaatatgtattgtaattgcatacaaaggaggaatctcatggtgtttcaatacagtctaaatgccttccttgcctttaaaaagcttctcagtttatatgatggtcctcaaaaattaaccccccatgtaattctctatcaaatcacaagaacaatatcaagcttcatgtaaaatatattataaaatccatactttattgccaattgtgcacgaagagacatagcccactttaaccttcattaacagtctatagttctctgttctatagaaatcgtcctttaatgaagggaaaaaatagcacaaaaggtaacacagtaaaactatccatgtaactccccttcttgctcaagaaattcagttttaaaagttaattatctattgggcaaaaagtaacattgccaccatgtgatttttggcccagttggcctggtattcatgactctgtctagacacccagactcttatgtttaggaatcattgaggggggcaggggacagttggtgctaaaactgatctattctgttcatctacactgatatagatgtaccatatacagatttttaaatcaatccaatgtaggacataagaagttaatctagcaaaggttttactcagtggttagggtaaataggaggcttcattcattaattcattccttcaacaagtatttattgaacacctgctgtgggccaggccccgagctggccgtgcagataggacagtgagtaagacagagagcaggtttcagtcttccaggagatgaggctgactgtgggtgcccaagcagccttccagggctgtccagtgaattcaagagggcagggaacgtgagggagttactccttcttcaaggagaagtagctggtatatctataaggatttcctgatatatctacaaaacacctctctcaaaaagcatctgtgagaatgtgtgaggggatatattttttaggtacttagcagagcacctggcatgtggtaagtaccgggcagtctccttttacttctgtgtcgaggtcaaaccacaccttggaaccagagagaggctgagcacaggggagaaaacagacatgtaaatgggggtcctccaacacccccttctgtggaaatgaatttcagccagcaggcctgtactggaaagaggaaaggtctgatcttctgccctttagttgcagctcggtttgttgtccctgtataaaatgtagcaacggtaagaaatgtcggatttcaatacagtatggcaaacatttatttaacatctgtcacataaaagactgttgcttacttgggaatttgtggatgatgttgccaggcccctcactggaatctacatgagagaatgatcacttacgtggcattggtttttgatagattcacttaggacctttgttagatgtattgcaactctagcatgtatttctgcttattatagaaagagcaaaggaacaacaacaacaaaacagggcctatcacaaaatatactgcagaagaatgagttccttgtagtgttttgaatatctgaggtagatggtggcatgcagtcaaggttctgtgtatttgtgaacaaaaatagaaaaatataacgcttcatatctttcaggcaacactaagttatatatagtaagatcagccatgactattaaacaagaatgctttagaaaagataaaatgaaaatttatattccttttagaataaaacatatcttaaatttctataaactgttgtgcctcatacgtattacaaaaataagcagtaaaaaataaattgcacctacctgaaatcatcttccgagataccctaaaactacacatcgctttcatctgactgtggctgcacgtgggcaaggctacattgcacaccagccagatccaccttgtgtagcaaagcatgcgccaggggtgcatcgttcagggcgtggcagctgcactgcattagatgtgctggatgtgtgcacagagccacgctctgtctgtacatttacatctacagaaagacacagatcgtcacgatcttctgtagatgtgcatgtcattgtcctggtcttggtagttgctaacagtgatgctggcaatggtatcagggaataaaactggactgaatgagcctgtgtatggaccacaggctcagccagcctcagtgcatatacttcattctttggattttgcctattggaagtgtttataaactttaaacgacctggcagttttggctgagagccttactccaggggctgcctgatggttgtcttcaaaatgagcaaactttcaatgatgactgctccttaatgaacctgttttcctttggggctgtaaatgaggcctagctttcatgtctaagtcctacatgcacccacgcaaaaggtagatgtttatttttttaaaactgtattaatgtccccaatccggtgggaaatttaaattagaagggcagagagatgagtgtcaatgctccagcaactacatgtgaataaggtattaaagtgtgtttccaatcatcatgttcaagagatttgcaaagaggtgcacttgtggatgttcacatggctgaagaaacacagggagcactcttcaccaaactggagacccgggggcactctccaccaagaccagagacccaggggtgctctccaccaagaccagagacctgggggaattcttcaccaagaccagagacccagggacactctccaacaataccagagactgggggtgggggggtgcactctccaccaagaccagagacagtggggtgctctccacaaagaacagagatccgggaggctctccccaccaaggttagagaccctggggtgctttccaccaagaccagagactggggcagggtgcgctctccaccaagaccagagaccagggggcgctctccaccaagaacagagatctgaggcctctctccaccaagatcggagaccacagggtcctctccaccaagaccagagatgggtgggggggggcactcttccactaaggacagagaccctggggcactctccaccaagaacagagaccaaggggtgatctctaccaagaccagagacccgggggcgctctccaccaagaccagagactcggggtgggggggcgcactctccaccaagaacagagaccaaggggtgatctctaccaagaccagagacccgggggcgctctccaccaagaccagagactgggggtgggggggcgcactctccaccaagaccagagacagtggggtgctttccaccaagaatacagatccagggggctctctccaccaaggttggagaccctggggtgctctccaccaagaccagagacccgggggccctctccaccatgaccagagacccggaggcactgtccaccaataccagagacctggggcaccgtccaccaagatcagtgacccaagggtgctctccaccaagaacagagacccaggggctctctctaccaagactatagatggatggagtcagtggcaagtctgtggtaaattcttggatgtaagaattacaaaatgccttggacatgtgggaaaattataagaggaagagtgtgtagacctcaggggctctttacatttgtcaccttgagtgaacaaagctcacctcctgggtatggaccctgaggagtaggcaagctgggttctgatgagactcgactctgaacatcacacctggagaaaaccattctctgcatccagggccttgtccaggtcatttctatgcatcccccaactccatcccaccaacatgtctttggatttcaaactaacccgactgtccaggaagccttttctgaccttcgtgaattatttccattgtgctcactcgcgtcttccccactttagcaggcttaccctgaagtgttatttcccaaaccttcagaaaccctgactagatcattttgaagatggggcattagcatttgtgtgaatgcttagcaaacaatggaaaccctcagccaggcttgagctgtgctctctgcgctctgaccctcactggcaggggcacctcgagttccactccctgttgcatcatcagccttggagcagtgtctgacaatatgtattcagttattatttactaaatgaaactaatttttaaatgattaaaaatcagaattaaagtctatgtttcattctgtcactaccaggtttttttttttagctgactaccaatttgttagatttttttaaaaatgtgatttcacataattataaaggcatatttactgatgttacgtaaactgtctggcacatgaaatatccaggaaagagttttcctttcagctctcatgacacagcttgttggggcccgctgcctatttagctggcctctaattaatttattagatttttaaagtgtgatttcacataattacaaagacatatttgctgatgacgtaccaaatatctggtacattacaaatgtccaataaatgtaagttcccctttcattcctctcatggcatggatcattcagtctgcttatttacatagtgttcacaatgttaacaagtttagacagtggttttatatttattaccctctttttaatcacatctttaattttatcggtttttaaaatattttccagtctcagggcaagtccagtacatatgatttatattcagcaggagcaaacatcaagtggttcagaaggcatcaaacgatttttcaaaaactgtgtgtgtgtgtgtgtgtgtgtgtgtgtgtatgtatgtatatatctgcatacacacatacagttgactcttgaacaatgcaggggttaggggcacacagtcagaaatccacattccacatagaacttttgagtcccccaaaatttaactactaataccctactgttgcctgaaagtttcaccaataacataggcaggtgattgacacatagactgctctctacatatatgcattcataacatatttaacttttgttttgtttcgttattttgagacagggtctcactctgtcacccaagctggagtgtaatgtgcaatcgtagcttaccgaagccttgacctcctgggctcaagcgatcctcccacctcaacctcccgcctaagtcccccaagtagctgagactacgggcctgccaccacacctggctaatttttgtagagatggtgtttcaccacgttgcccagactgtccttgaaatcctgggctcaagtgatctgcctgccttggcctcccaaagtgctgggatgacaggagtgagccattgcaccctgcactttttgttatttttttccccaatatttctaggctagaaggttcatctataagttttttcaaactgtaacaaatcaccaagaaattttccagtatgtttattgaaaaaaatccttgtataagtggaccagggcagttcaaatttgtgttgttcaagggtccactgtctgcataaaaatacatatatacatgcacacaagtgtaaatgatagatatagacagtaaattacaaagcaaattgggtaaaatgttaacagtaggtaaatctgggtaaagggtgaatgggatatggatattatctcaactatttttgtaaatatgaaattatttcctaacaaatttttttaaaaaaattaagcaacttatgactacttcatgaattttagttacaagcagtatgtggagtaaatgctttgtactaaatttgaacacaatggtgtttatggtgaacctgaaatataaaataacagtgttaacatgtcaccgtctcttctgtggagtgatacatgtatgcctgtgtatggtggttggcatttatgtgtattttcccagctccccaatgataaacctaaaaacctctaaacctaaaagtctcagcgctaaaaatccagcaaggtcaaacaaagatttcaggggcccaagctcatctattagcataatatgaacccagcccgtgtaacgtactgaaattgtgccatgccacttacacttaaacagacagaagttctctgctctgggtctctcaatatacattttttcagcaccctgcttcactttagaggtgaagttgtgggctcaatgttacccacatcacttgcccattaaaaaagccaccatcgtcataataccataattttctgcatgaaattttggtctccttacccttgtagaggttcctctatgtacaagtttgcacaaaacactgcagggattataaaccatgaagaaaacatggtttcctttcaatgctctgcagagtttggccttttgagtaacctttttttttttttctgggagctttctttctcttttttttttaattattttttgagatggagtcttgctctgttgcccaggctggagtgcagtggcacgaccttagctcactgcaaactctgccacctgggttcaagcgattctcctgcctcagcctcccaagtagctgggattataggagcgtgccacaacacctggatagtttttgtattttttggtagagataaggttttaccatgttggccatgttgatctcgaactcctgacctcaagccatctgccttcctcggcctcccaaagtgctgggattacaggtgtgagccaccgtgcctggcctaaataaggtgtctttgaacagaaacatgtataaaactgaattatgtattgatcgttgatgaaaatgtgatcagaggtttttgggaaccaaccctgtatttccttgaggagcagtattggctaattcagtgttcctggtgactttaccacaaataatgagagttgacttgcatgtgtgtgtgtgtgcgtgcacacgtgcatgtgtgtgtgtgtgtgtgtatatatataaaataattattactgtttgctgaatcatttgagagcaacttgcagacattatgatccttcatccctgtcttagagtgcatttcctaaaaccaaggacattcttttacataaagttactttatcaaattctgaaaatttaatattgttacaatattgttatttggtggtcattctaaattcaaatttttccaatttttcattagttgtaagttctttctgatgcagaatctagtccagatcacacattacatttatttgcctcctgagtagctgggattatcatgcccaactaatttttgtatttttagtaaagatggggtttcgccattttgtgcaggctgatcttgaactcctgacctcatgatctacccgccttggcctcccaaaatgctgtgattacaggcatgagccattgcccccgggcttgcaagctcttttttaacttctcttcctggacaagtctctgttgtggctctccttcagtgtctctggccagtcattctcagactgggaaagccaggtccttctcctccttggccttctcatcatccatctccttcctcctgggccactcttctgtcctcatttattccgggtttttccttttcaaaaacctgtttcattcttatgtatcctgtggacttgatgaaatcttacatgacttcatacaatcacatggcacgcgtctcctggaaagttcagagatctgtctgttcattaaccccctccagtgggactctcattgatgtggcagcagcaacatgaggaatagaatcagaaaacatttcctgtagccatttggctcattggagtgaaggaattttttttacagttttcaagttatgctgttttctaaagttttgaccatttatttttatgtcacagagatgaaattgattttgaggtcttatttttgttacacaaatctagaggagagtgtgtcagtatctcttctaagtattagacacattcatttgctttttcctggaggaaaacatgcaggaacaagaacccaaaattctagatatcattaattttttaaatttaaataatttctaagagaaaagagacgttatccatacaataattatgcaactccagttattattattattagtattatttttgagacagagtctcaccctgttgcccaggctggagtacagtggtgtgatctcagctcactgcaacctctgcctctcaggttcaagcgattctcctgcctcagcctcccgagtagctgggattacaggcacatgctaccacacctggctaattttttgtatattcagtagagacggggtttcaccatgtctgtcttgaccatgaggcctcaccaccatgtgctcaccatcataaggccaggctggtcttgaactccctacctcaggtgatctgtccaccttggcctcccaaagtgctgcaattataggtgtgagccactgcgcatggcccccagttatgtttgaatggttgctttccatcttgtgggtgtgttctttagcaatgaccaggctgaagcaagttcctcccagatagttccatctttgcaaattaagagaaagacagctagtgtggataatggaagggtgacttccaatgtattctctggaattttagtgaaaaaattaatagtgggtacagctctgcacagatgggctcccttggttcatgtgaccacagatgttttggtatcgtattgcatgtgatttctgtagctgttaaggtattcccatagtaatacttatgtggacacgttcttgtaaaacttcccaccaaaattcagagtgaaaaaactaacatatcagggtgaaattatctcaggatgcaatatgaagtcttaagaagtataactattcatttcttgtctaaattgaacttgaatcttgagataatcccagaaagttttgacctcgccctgcctccgtccttaaatacattcccttgagttaggttgagccatcagactggtttgcagagtgcccagtcccaaaggctgggcaagagaccggtctttggtcttcatgactcagcatccagtctctgagggtgggtgaggctcagtcctcagtcttggtgactgtctttgtctgcttgtgctgctataacaaaatactgggtaatttataaacaatgaacatttatttctcccggttctgggggtggtaagtccaagatcaagttcccagcaggttcagtgtgtggtgagggctactctccgcttccaaagatggtgccttgttgcagcagcctcaggaggagatgaacgtcgtgtcctcatatgctggtgagcatgggctgcggggtctcgtcctcatctggggtgtccgtactggtgagggtgggctggggtggtctcatcctcatctagggggtttctgtagcagtgagggtgggctgcggggtgtcatcctcatctgtgggatgtccgtgctggccatcaccgagttgagcacttcccatcctggagtcttggccacaaccctcacatacagacaaaagtcgatttgggtccagcggctctttcagcacgtggtgccaacctaagacatgaggcctcctgctggagctccaggaaactctagtctctgccctcctcttgcatccgtaggatcgctgggctgctgctggggcttggcaatcctcagagaccttggacttgtctgcttggagataaggcacagtcatttcatctccaactgctgccaagccctgctggctggcaggacatttggactctctctccctgggttttcccaggacagaggttacagatccttcagctcttaggctgatgtcacttccactccttgatctcagcttacaggaaaggtggagagaaaaggcgatcagagcagagtccctttctgaagacacacttggtcctcccctgcctgggtctgcaggggtcagaagcatttccatagcagtcattttcatacaggccctggctcccattaggcaaccttcctctttggaaaacccaatagccaggaatttaaaaggcaggactcttttctcttaattttctcctgaaaaacccttccctgaggcaaccagacccagctgctgcccaaataggaaggaaggtcagaattgacaggaattcacaaggaaagagagcataggtttatatttcagggtatcagtcatgcggccatgggatcagatttggaactctgtgattaagctaatttctggcattaggctcaatccctctgtgacagagaagtgtaaaattgtcaaaaaatgagcattattttagcaacacaatcctgacactatgagagggagaaaactgggttggatcaagtattcatcttacccagtaagccattataactcaggcttttgatgcatattttgggctgttattcatcaaggtggtcaaagtcatgaagaactgtatgttattctataatatactttctatattaagtctgttcagatgataccacattttctacatcactgatccattaaaaaaaaatctttctttgaatgcctcttgccactaatcaggctatgatattcagtttttgagataggttaacaaattgaaaacccagctttaaatgttatggtagtttaaaaatagaagtgttttacttcaaactattctgagttgctgcttagagcaataaaaatgtactttatagcttgttaacctagatctcagggatatccgttctacaataatggaagtagatttgtttactgtctaaatcagccttgtcagaacaatgctctccagtgactttttaaagtcagagtaaaccaatacattctgtcttctgtgattatacagcatggcatggtgttctcttgtatacttgtgttttgaatatgagtaacagtctttagctgactttagcattttggagaaatctgtatatgtggcttctacttatataagcatctaccaaatatattaactgagttttatagtccggttattttccatttcagttacttccaagactcttcgatatgcacttacatacttcatactcattaaatgaagatattggaagctaccttattttgaggtacagcataaagcaccagcagagcttagttactacacattttagcacaatctcctgtaagttactgcatgctgcaaaagagctgaatgagtcaacagacattgtaatggtgatgtgtaactcataacctgaaataaactatgtcaaatcgattagaaaggtctgagcacatctggaaaattggcaggtaatttagaaagaaatgactagttattaagaactcaggccagttaaactgggagattaaaatgtattacattgagagactattgccatcaattgccatttgttattgaacataaaatgcagcctagttttgagactcaagtgatgaacccttcccatgggttctttctacctttctactggtcctcaaaaacaagttaaagcaaaaaagatttaagtgataaaatgtgtttatgcctcttggatgtatacttttttttaatctaaggaagaaaccttatgatatgatatgatgaaaccatcctctctggattctaatcctaagtaaatactgaccagctgcattaagaaattttctgtttttttctccagatcttcaaatgctccattaaaaaaagaaagtttgttctagtgttttcccatcagcatttacctactcttatgtaccttcaccacaatcaaaactgttttccagcccaaacttggcctccaggccctcactgctctagagccagcccctcctaatggtttcgctcacactcagcgccttagcttcccctcctcagggtcacttagagaaggaaatacttctgcctctttgtaccacctcctgccagaaaggagaccccgcactgtacctgattctttgggtcataggaacagcatgtgccccacgtgggcattctcctcagtctttatatcacataccctgtgaatcagcatgctggggtaggaccccagggtggaaactgttgaaagccgtccagcaggcaatgaggtatgctctaccctggaggcctggtaaccttcacgacccccttgagcttcaagtctctgtggctgatggttttaatgataggagcccagaaagggaggcagcttccacccagctgcacccctcgaggtcttgtgctccctgaccgggccatcagctacatccttttgcaaagcagccatcagcttatgatggggtcttgctaagctgagtgcctgctccaggaaagccttgtgatgctcatacgtggtccgatacttgtatttggggtgagccagcttaggtttaacgactaaaggacaggaagagcccggcaagccttgcttgtgaaatggacacggtatatccaggaacacacccagtctgaccccagcagcactgcactttacatggaaagttagcagctatccattattcatttcaactgcaatgctattgcagtcaggcagtgcagagagacagcagttttcccttatccaagtgatcttgagaaggggaagttgaggcactaagtagaaggaaaacccttagggaaggttggctctaaagagcaggaaatttatccctccctcatgcacctgaagcaagctggtgctcagtgggacccacaattcatagaagttccctaaatgcctgggcctggttcagtgatgatttggctgagctgagacctgggagtgctctctggcttgctgcagccattccatctcagctccaatgagacagggccaaagatggacctgattctccacccagtgggcagaactcaaggccattctcagctataactgctacttcccttggtaatccctgttacattcttcccaactcttaggctgttgccaatggcctagctatttggtttgccacctgaaaaaaccagacaagcagataaaaggcacctctttggggggctgtagaccatggaaacaaatcatgcatggaaccatgtgggtcactcaggtacaagcccacagtgtggacctgtttcgatgagaccaactggaatgagctgctgatccagatggcactggccacataaccaccaggctgcctgagtttaccttcatactgggcattgcagcacatcccccatcacaacatgagcacaaaggaaacccagtttctgacacagagctgccactcactgcatgcaggtgttttatagtccggttatcttctgtttcagttggtgtctcaggaggccacacttccctgggcaaggccccccctgctcctggaagactgactacgttggacccctgacctccactcagggctgacactgttccaggctatgttgttactgtcccagtctggtcagccaacttcagccacaccaccagtccgcttggttcttactttctgtttgcagtctgacaatggaacaccttttgtcaaggaaaccactcaggagtggacagatgaccttccatgccattgccatccacaggcaccaggcattgttgagcactggatcagtctcttcaaaaactgactcaaagacatctgactttggtctcctcctggtcacacgcttgactaagacacgttgttcactgaatgtagctgttccagaaagggaccatcttctcttggctgcttcttgagtaatgaccagaatgaaggggcaaggaatcatctagatctattttgaaaatttgataacctttcctgatcattcctggacatgaggcttctctctttaccctaacaactcccccaggcccacgtggttagtgcacccccgtgagcccagcgcgttctagtctaattctgatgcgaccacctggatgctcatgccgcattgccatggactgagataggtgggacagggaccactggctgagagctccgccccctgacccccctacagtggttcacacaggccaaaatggtggccgtgacaggcctctgtagactttattaaaatcctctgtgcctcttgcacctgactgtccagatggaaagtcgggagtgagcaggggcatggggagcaaagtaaagctccagccactgacatagggcacactaattttattccagtggagggagaagaaccacctcagcctcaggagcctcggcccacaccccagagaaccacctcagcctcaggagcctcggcccacaccccagagaagaaccacctcagcctcaagagcctcggcccacaccccggagaagaaccacctcagcctcaggagcctcggcccacatcccggagaaccacgtcagcctcaggagcctcggcccacacccctctacctccactaagaggtaagcggggtgagggctatgaatgacctttttcctttactgtcatccctggtgtctgtcttccttgtgaaggaaaataacttggtgccgctcacccaaactattacaagcaccttaactgactgctggctctcacatcgtcaccaggcagctctgaacacagctggactgccattgcccttaacttaccgagaaatttttggaaacagcaggggagggcctcggctcgactggcagtgtggacagacagggcagggtaaatggatggctctcaaacagtctctccaaagccgagaaggacttcacccagttgctcaaactgaactggaaacggtgcgttttaccagcagatcaggaggctacattgtagtgattgtcaaagtgcacttctcagttcacactggtcccaacagtcaaggaagcccaacttgggggtgccagcaattgtaacccacactctgttttcagaggcaccacgcgtgccccagatctacactccttgtatgggagggagtcaggtactaagttgcttttcttccccaaaacgtgctttcctttccccttacaccttatggattctcttgagaatggaagtcgacaccatcgatagaccgtgcagcactccgacggctatgcagatcgaaaacagagccgccgtgcttaccctcaccctgtgggcagtcagatatgatgggaatcacccagttagaaagatggcatggaatctgtccctgacttcaaatgaagtaatcaatggtattgccctggaaggcaagcaagtcagcctccactcaccagcgagagttgtcagggatggtagcattgccccagactcactcttagtggcacaatcaatcacgaactcagtcattcataccttgggacgtaaagaaatgacagtgaatggcagtaacaaaggcacaccacagcaagggacccaagctcggcgcaccattgtcctttttcattctggttttgctgagctgctgttgcttggccttgcacaaatgctgactgggagtagtctgagacctggagtgggacacacgtccttcccatgactaaaactgctgatgaatatgataatatttctacactagcctccctcaagcccagaaccatgatctggaacagcatttgcatggagcaccaaattacaggccttaatccaacaagtatttcttgattatacgacttgattccaggttagacagatggaaaaatgctgataaatataaaacatgtcttgctctctaaaaaattatagtttggttgcaaaagtaagaccaagttgactaagatataatggtcttttgtatcattatgtgatcatttgatcattgtatcattatttgatcaccaaattatatggggccaaaaataacacaaaattgggaaagagattgtaatcactgagggatgaaaaaaggcagtcaggttttgaaaaagagctctatttgggtgcacgccgagcctgcctgactgtctacaaatgaaaatcaggccaatgcctgtggcctgcaaggcttctcgatattctaaggtgacatggattgcatgttattatgcaatttttaaaaaaatggtagagcctctggatgaacgtgttataattaggtttccttttgttgatttggaactctttctgttcattgctgtgtgaaacacgcttgtggaaggaattatgccagctttgcatagtgtgcatttttagagagaacattttcattgaaacagaatcagaaatgtaacaacgagttgggtagaaatttgtcatgattcttgttggcatatattattgttgctaaaggcatttattaaacttaatgaaagtgttcattaagaacactgaagattataatgctgacaaaaacaccaaaaaaagtcattctactacattgaagattaaaaataaataagctaccccatcaaaccaaataaactataacttttaggtaattataaaatacaacttcacctgcctgggcaacatggtgagatccccgtctctacccccccgcccccaaaaaaaaatttagccatgtgtggtggcatgcgactgtgatctcagctactctggaggctgagaagggaagatggcttgagcccaggaggtcagggctgcagtgagcagtgttcgtgccaccgcactccagtctgggtgacagagtgagaccctctctctcaaaaaaaaaaaaaaaaaaaatacaacttcaaatgaatgaatactatatttcaggtgataattcctaataataaaagcaaaatattacaactacccagcataactgtctatctgtgatctttcacccaaagctcatggcctttgtaccattctgtgaatttcaaggttatcaaaatatagggaatgttaactaatggtctaacatttcttaatctttactttgtatcaaatggggctattacttaaattctttgtatgttttaacggtttcttatgaaagcataccttcttcacccagcccgatcttgacagtaatgcctaacactaaacaagtcagtgttgagttgtttgtttaatctctccaaatatgttggtttaagacctgtacaatttgaaaataaaacctgcaatactttttacatatgaatagcaatttacttatgtctgaaaccttagcaataactgcacagagagcatccaacagtcttaattggagttatctgattattactcacaggataccacaagctctaagaacatttactttacactgctggtgttctggtcacctcctcggtgaattcactgctccctttgcccaagtcgaacagtttctattatttgtaactttttctttgtagtgtttactgtgaagatagctgaatgtttcagccaggcttttttcttcttttacagaataatattgttcatgatcaacacagattctacagagtgtattaaaaaaatagtcatcaaaagcttgattgctcccagcagccttagatcaggcctgtgtagagaaggattgaccatgaagccgaaaggatcactgattgccaccacaccttcctcagccctgagaggggcctaggcagggtggtcacatggccatgtgttcttgtaaaattcacaaacgtgagatcgtttggccacagtcctttgttactgctgcctctttctaccctgacttcactccagcacattctcctgctgtttagaggaattggagtggggcttggcagcttcgggatctagctgggggaacattgatttggaaagacattgagtatgagtttagaatgacacattttgtggttcacgcttactgcggactgtgctgacttaccaggagttattatgtgaaggtccagggataatttctccgtaagaacgcatcccacggtgctggcagcagacccacgagggtggtagaggagaaacaagattggaaatgtctggagtcacaggcaaatccgtggtaaaatcttggatgtgtaagaattataaaatgtataggctacctgggaaaactatgataggaaggttgtgttctcatcaataatgcagggtatattataaacgtatccatgtgttcatttattttttcatgtgaattatatgaaacatgtatcagaattttttcctttgtatgacacaatctgtagcaatttagtaagcaagcggtctgtgtgtgaaggtgaatgtcttatgccttttaatatattggaacaggtcttagtatatttgattattttgtttcaaagccatctggcaggtccaaacagcacatgtgtcattccaaaaccaataatttattatgagaaggaaatacattttaaatagaagtaatgaataggctctcaggttattagacaacttaattaatgaagagaagtggtgcatacgaacccattgggaaaatacttgaatttcttgcttccttgacaaaagttctgacatcaatgaatataatctgatctaatctgccaatgagcccctacaacaaggaactaacgataaacttgttaatgagtgtcagcaattcaaagagagtttaagattagttcctgggcaacaaaacttgaaaaacctagtattcttattgcttgcatgtgagagaaatttggaattccccaaaaaatgtgcatgatataaccaacaacaagtcatgaagctgaaagtaactttttcaaacttcagtactaaaagagaaatttagatcaactatgctgctggaaagactggattatctttctgcttttttctttataaaatgatagtcatagtttcgtattcttttttcaaagagcacccccaattgtgcaagcctcaagcctgaggaatttgcactcatcaagtacctgtgcctgatgcgttctttccagaactgaagtctcattgataggtgaggtaatgcgatcccagctggtatagagatttattcctccagggagtagacagtgaatttatccagaaatgaatgtgtatacgtaagaaaagctgttcataccaagatttacacacctatgttccattaaatgcaaaggatgtggtttcatttgataatcgcttctggttgccatcttggtaacgttacactgaggtgctggagaggtctgtagccatttagggtcttaccttcaactattctgtgtatctgttatcagggaatttcttcatttcacgctgagcaccagtgctgtattagtgagtggggtgtatagtttgttggcatgcacggacttctggtcctataagcttcaggctgcagaaagggtttagccctggaccattctgggatgcgtcgtcaaggctggtgcttctgcgggaggcagggcactcagggctttcatgctgcaatgggggagtcccatggaagccagaacgaggtggtcaccctgatgtgaaggaatctgcagaggcaggaagagccctgaagctagctccacgttcccctgtccatgtctacattcacagacactttcccaactctccaggagaagcagtgcagaacgttctggaaagagagtgaagttttgccctcctaagactaggtttctgatgaaagtaggaccactgaactgtaggcagctacaggatagggcctgtctgttcttcaccagtgtagcctcagccgcgagcacagtgtggagctgctcacagataatgaagacagatggtgctaagcggaatctcctctctgctgagtgggttgctgtagtggaagaagcactgaagagtcccaagcgtaggttgaactccttgagtatgtcctgagagactggggcagcctgagtctctgcgcgcaccagcctttacactgaagtgagattctatgtaagaatataccttgtctaccggaatgcaccacaggactggatattgttatggtaaaatattttagtaaaggaaaaataatgcctaaatacatatagcctttcagaaattttcacacaatggaagtgctgtggtgattatgaacacaggctctggagcgatattccctgagttcaatcctggatctatctgttatcagctgtgtgaccttgggcaagttgcttaatctctctgtgtctattttttcatctgcaagtgaggataatcatagaacctacctcacagggatattgtaagaattaaatgagttcacacaaatacaggacttaaagagtgtctgtcacttaggaagcacacaataaatattagctattatcgttatggtcttcgttttactttattgatgcctaaagtaattttgaactaaaaattgtgattaaaattttgttttgtttcagagatttggaattactgtctaaatccaccaaatcttgataaaatattacagggaaaatagaagtttgggtaatgtccctatttcattatttagtatctagacacattatttaactgatgtctaatatgaacacttataaaccaaagaaagtgagtttaaatttcaccaggtgttaaatataaatacctgtttaattccgagggtggttatatcctaggacaaagagctatcaaggttatattgtagtacaccaactctgggagatgagggcttgagtaagtctctagatacttctttttgtgtgctgaggggttttgcaattctttggctgtcacagccctgtgtaaatttttgaaaattaatgacaatttgctggtagtggccaggtggtgtgccaggggagaaagaggaggttagagggagatgcagtacactctcaccaggcagtgtgaagacaggagagctggcatagatgaggcttggtaacaaccagaaaccacggggggaaagcagcctcccaggaatgagtcagggcccagaggacgtctcacctttctaggatctgtgtggctaccgcttcggcaccacctaggagctgtcaaaattgcaagatctccaagcccgtgccggaccttctgagtgagtttgtgttttattcacccccactgaggactgtgtgcaggtaggcattcgggaagcaccgggcaggaagctgtccttccatcctctcttcacctctgccctggctcctgccgtcctctctgtaaggaaggtcttcctcccagccagggtgaggctgagagctttagagccctaaacactgagaagacaatatgcagatgaaatgtaatgagggcctgagctacaggagtcacttggcatggcaagaaatcactggatacgagtaatattaagatattcacattgtgaaaccttgttgccccggggaggataagaaaaagcagcttacgtttattgaggtatttactttcattagccccatcttacaggagaggaaactgaagctggaaatgaaataacctgttccaggtctgagcgcaaggaagagggaaggccaggactcctggctttgggtctgcacccgtcaccgtcaccgctgtgcatgcagaggatgaggggaaggtcagggagctgcagggagcaaaagggtctggctgtggggaagggcgggggagagagagccagttccttatggtcagaccggaacatcgtaatgctccctcgagaactgatgctctggtatcagagcatggtcaggccggaacatcgtaatgcaccctcgagaactgatgcgctggtatccagggaggatcggtaaaggaaccaacacgcacatatgcactcacaatgctcacggatgtcacgcagcaggacctggcagggctggcctctgcttacagaggccgacgttccctcgccctgagacatcaattttactccatctcttcttgcctcaaactttccatatccgtccccattctaccctcacttcttcaacctgtgattcctaggtgattcctacaaggagacgtgatagcgtgcaagactcaactcccgtcttcaatgaacttacgtttcaatgagaatgtatgggtctatggatacttcagatagtctcatgtgaacaatcttaccacctgcaggaagagcatttggaaccatggcccattctttcttcaaacttcttttggcttccacggcatctctttctctgcatttcctctttcctcactccttggctggtgtgagggcccccgagctgccactctaagctcatctcttgccgtctttcttattcctcaggctccaaacacaccggcttccccgccatcccccaagcgtgccaagcgctctgctgcctccgggacttgctgtttgcttttctttctgccccagcgcctttcctgtggctggctccttctcagccatcggatttggctcaaatgttgcatctcctgagagcctgtttttaaacccttgattttcctcagttctattaccttgtttattttattcaaaagacttatcatgagctgaaagtatctttttgtttgctcatactctatctccctgactagaattcttcaactacgcatcccgtctatcttatttgcttcagcatctctcatgattagaacatagccttggtgagtattatagtctcattaatttttaatcaaatgaatgaatatataatatacagatacataatacaaacaatttaacctggcacataaaagaccaggagagataagacatccattttctggtatttagaggactgtcataaagaagagggatttaccctgggctacatcggctctaggagatggaaccgactaagagtgggagccgaagcaggtatatattggtgcaatttaaggaagaacttcctaccaggtagagtgttcaaagatgtaatagcctttttgggaaggtgatgagcctcttactacagtttttcccaaatagacaggtagcttctgggaagagatgatgtaaaggagattcatagctgcttgtaataagtggcttttaaggtttctttcaatcctgattgtctcttagaagttgggtgcagtgactttctctaaggcatgtactgttccaggatgatacatagataaaggtgaggttactaggaaaatggactcgattgtttagctgtatcctaatacttgttttcaaagagtaagctaaacacttacagtttttaaatttaaaaatgagatagagatcaacaacctcaaaaacaacgtattcaaatcctgtggcaccgcctttgctcagggagtctttaaagtgcttattctagaatttcctggagagtcatgtaacaggaagttgtgcaaatttgttaaacactttatttgttagatttcagtttaaaaaacttctgctttaaatccattcctagcgggtaaagatgtacctccactaatttgaaagaacaagttaaaagctctgaaaataattataaaagagtgcaccaaaaaaatatttgccacaatggcaggatcgctaaggtaattacagttccttccaaggtcattacttggtgacaaatgcctattggatatattggctgtgttgggcatagtaaagaacaatgcccaggcgtattgcctgatgggaatgtggcctgtgtgtgtccatgcgtacatgcagattacaataccaaatctcttcttcttaatcgttttttgtttgttttgacaagaagattcttactctatggtttcacacgttgcatgctaaatatttcagcctttgcaaatgtgataagtatgggttctgacattttgaagatcttttcagaatattttagaaatgtattatgtttattctacatatgcatgatcagtgttttacatgtgattatagctttgcatttacaaagaaaataactgttaagtaggaagcaatccatttggatgctctaaagagtaatttgagtggcttgtaaaccttttactgttttgtcttaaatatatggctgatgatatacctttaagtagccttaaaatactatagtttactttctatgaatgactgcagaaatttcaagcatacacacagtgcataacattctacattatatttttacttttaagaaacaaaatgtttttcctgtctagttctaatttatcactttgtagttatgcccagtgaactgataggccattatcccatcttattaaaacactcagggcttgctatcccgacaatatatcaaaagaaaagcaaaacaagaagatgtatacagaatacttaagtcaattttatcttcagagtgcggttttcaggtagagacgttgtaattgttaacaataaaggtaaaatgtagtctggttttgcttgagttttcagatcaattttttagacaaaaatcatcctatagtttagtatttggccaaattattttcttctgaatctcccaaaaaggaaataaagtattcctcttatcaatttgaccccataacaaatgctgccctttgggctttttttcttcaattccaaaagcattttaacaaccataatccaagacaagaagataatatatttatcatctgatcatttttacaacttctgtttttctgctataataatataccttactgttaatccttcccagctgttggagtaaagcacttagattgaactatgtctgggttttaaagatccaaagctggaatgttttattgttgctaccttttaattaaaggaaaactaaaggttagctaggtcctgataaaattggaatcagattaaggtgaatttttctcccatactacagtttgttgtcaggttttaggtagtaatactagaatcagacccacccccgaccatctgactgtgcaggtgagaactgtcactttgtcttcaagaagcttcaggaaaggaggatgggagatatttgggaatatatttttctctaggggaaaaataataatatgttaataatttaaatacccaagtttttaatattggggaatgtattagtctgttttcacgctgctgatatatacatacccaagactgggtaatttataaagaaaaagaggtttaatggactcacagttccatgtggctggggaggcctcacaatcatggcagaaggtgaaagacacatcttacatggcggcaggcaagagagaatgagaaccaagtgaaaggggtttccccttataaaaccatcagatctcatgagactgattcactaccacaagaacagtatgggggaaactgcccccatgagtcagttatctcccactgggtccctccctcaacatgtggaaattatgggagcaattgaagatgagattcgggtggagacacagccaaaccgtatcagggaatatatacttatgactgtctcttacttttttgtctgcctacttctcttaatttgggaaactgcccccaaatacccctttatgtgatcgtgaggggtttgtcaaccaaagactacattcaccctgcctcagggtgggcccctgtatcagttgggacattccagagaaacagaaccaataggttaacacataatagggagatttatcttagggaattgacttgtgtgattgcaggggctggcgagtctgaaatccacagggcaggccagcagcctggaaataagtgttgatgctgcactcttgagtccgaaatccgcagggcagactgataggcaggaaactcaggcaagggttctatgttacagccttgaagctagattccttcctcctccttcagaacctcagcttttcctctgaaggttttcacccagccagatgaggctatatagggagggtaatttcctttacataaagtcaactgattttaagtgttaatgacatctacagaataccttcacagaaacatctacatgaatgacgcaacagctgggcaacatggcgcagccacagcaacaaataaaagtaaccattgcagccagtgagtcccacagggcccttctgtgaaactcacacagactcaggaaaaccactgggcattttctctcaagtcggggaacagcccctgctggttgaagggcctgctagagaatgcagctgacctgggagcacgtggagtgagggagcgagggaggccatcctggtggcagtgtccgattcctggatacagccgtgctgccgcccaactcaaccctggaattccctctcttgcttgagcaactaagactcttgatgaatgaagaagacttttagaaacctattaatacttaaggttaggatgcagcttacatgttaaatgacgttcagaaatccattcagtcattttttcaccagtgttttagtgcctgcattttacctttatggaaatgttaggcattgagattaaagtagtgagcaagagaaacccagtgcctgacctgtttagtggaataagcaacattgaatgataaatgacaaggaaaaaagcttacaaaagagtaaggagatgatatggcatgagaataatgcaggagtggccgactatctttgggtgaagattaggcttctttgaggaaatgcatttgtgatgcaacccccgaaggtgaggatgagttagctgggaggggaagagtgatctagtccaagggaagtatgggaatgaaagagcaaggactatacatggagttgaaagggcacaatgcctgggacagagacagagatgagaagagagacagggggaattcatgaattgggcatcaggaaaagcctcctggtcccctgtaagccttgcctacattggagcaacaaggtggtggtggcctcgttgcctgacgcaggaggactggagaaggaaatgtctgcaagaggtaagatagtcattcagttgaggatgcattaggcttgggaggagatgtttaagaagcaccatgagcatttagggctcaggagagctgcctgtactatcacctgtcatctgtgtgaatggagtgggaagggaactgaagatggaaaggatgctttctgaaggtaataataattatgagacagtgctttagcttattgccagtaaaataagcttaccaattttaaaagggagaaaccgtttctgtttgctgaccagactggcagcatttacagtcactaagtgggagctggaaagaatcccgcagctcgtctaattccaccctttaatttcaaaaataaagagattgaagccgagagagacagtcaggaggaccaaaacccaaaccttctgacgtctgctactttgctgtttctactacagttttgtggaaagggagagagggagacagggaaaaagaacactttaatgtaataaacatttccatcttttcactttccctttaattttatttatatagccatgcacctaatttagcttccaattaatgttgagctgtggtggattggtgggagctgcccgaagcactctatctgaagccactttggttttcagtgtttagtatgagtaaggcatgtatctaatgtccaaaccagtccaatggagagtgaaatggtggttattcctcatgcagagacagcaggcatgaaccagaactgtccccagcaaactagaacccgtggtctccctaaccacgaggactataggaagaaaatgcagcatgggagccattttgcaattcctggtttatatggttttcctatcgaagttagaatttgttaagattttgatacagaaaaaaagggggggaaagctgaggaaaaattgattccaactgcggcaaggttttcaaattttttactattgtcttcttcatggagatgtattaattattcatcttgaattttaataatgattttttgtgtgtgttccaaaaaaaggaattaaaataattactttgtataagtctaccttgatccaaaataagtatttcaaaataggaaacatgtaaatgtcaatttaatgcaaagctctttctcctttaagtcaatcctcttcctctgaaataaaatcttctgtaaaggtaatagtatttgtctctccttgtgatgagcatttttagagttttagaaatttctttgacactggaaggaaattttcttttcttggtaaaaactaaataatcagtagagaatagtgcttccaaaacaattttaaatgccagaccgtatttcaaacaaccgtctaatttgagttaagtacatttgggaaatatagttatcaccaatgttgacagaaaacttaatattggtgatcacgacaggcatagatcaagcactgatgaatatgcctttgatggagttttctcacgatcttcttcatgtgcaggtgatgacagctctttcttccgtggtgtttacctgtacatcaatactacaggcatctcaaaagacgttacaagtattgaagatctttatgcctctgcctgtgggatttctttagggaactgacatattgctaaagaatagactcaacatccattactagctttcattcaaatctctgtacctcacagaaaatttcactgaaaacaatgatcgtataccttgtatatcagagagatgttcatgttatgggaaatgtggaataagttctggaatatagtgcatatgaaaaccagtgagttttaggaaaatatttaaatgtggagaaatgcaaattatactcaaatgtgggcttcatcagtgtgaggagctaaggttgctagggtattgaaagttaatactctatgaaatgcatcttaagcagaagccttaaattaaaaatctacacaaatcaaactaagtgtcattattgaaaagcattttgttcatataccatgagttctttatatgaatgatttgcatgtatcagatcttttttttattccagacattttgtcctggaaaatatgaacttgtttatggaaattttgccctttaaatgttgcagctttaaaatacggctgctccctgttctatagtttaaaaatggcttagattcagtagtttatttgtaaatattatcaatacatgcctattttatgtatttagtaggtggatatctgaactcattcataaggaaaaattgaaattaaacaatttttctttcaattgggcatttctaatattttttacatgatctgaaaattaattcctaggatcatttgaaaagacttctgggtaaggggaagggaagagagtagaaaaatgcttcctacacatttagccattagattttagtcctcagcaggcaggtttttctggtgtgacttcatcaagcataacttaatagagaaaaggatgatttcatttattttaatctacaacctcaaataacataaagacctatgaagtatgcgtgactctttcttaagactcttaagaaagattcacacataaaaagagctacattattttatatatattatttcttaaaaaatgcgtttacacttgaaatagactcataaatactatggaagctataaaacatattttgaaagcaagtcctaaagtcttcagggtacgtctgtcctcatagcaaactagtgatttgagagttccctctatctttcagaatttatgtagctgaatcttaaggaccagacttatgacacttatgacactgccatcttcaaggtatttgccatataatttcagtgactgaaatctcatatgccttgaaaacctaagagctgtgatattgcaacaaaaggacaaccaagtgacatttcctgcaaattttgagagttatacatacgcctctcaaataaattgaaactgcaatttgggtatgtaaccaccagatgtcactgtcttgtgatttttaagtcataggcatatattaatacttacataaagtcatataccaattttacacttttcctattgaataaattataactctttatacagaaacaataaaaagactacattaatgtttggttttgaaactcaaacttcagccaagttgtcttaattcacatacatacctgctaagtagtggatatctctcatttcaaaagcatgcatttctgcaaaactggattatcataatcgtgtttaggactctttaggttgcatcttaaagaagcccaacctagcctaagcacaaaacaggaaatccattggcacacatacagaagcccagtggtgtactgccttcaggcatggcctattccagaggctataatccattttatcacaatgcatcactcagtaggctctccaccaaatagcacatgatatggccctgcagctgaagacccacattctacaacctcagtagagacaggccattccgagacattccatgtctctgctcttttcaggttctgtaaccacagtagagataggccattttccccaatagctggcagaaatgagctgaaataagttttgattagccagtcttgggtttcataaaccttcaggatccagtcattatggacaggggcatggcatacttggattagccagaatcaggggcccactgcttggctgtggcagtggctaggccatcagcctgacttaacaatatgggatggatctccacaggaagcatggcaccattagtacagcacagggagatggaagctgggtgggcatatcaaattattggactgtcattccatgtctctgctcttctcaggagcaagcagtcatgtccatggctgccagagtgacccctctagaacaaaatctcgaaatgctactcttctctcaagagggcaagatgcagtacaaactgtgtagtatacacgactcctcttgacctaacttcttccttttcctgctttagtctcatctcccatcactgctgaatccaaccacatgaactctttgcaattctaacaaatgatcatactctttcaggtactactttccacttcacaagccttactctttctcataacaaaggcttttcccaagttatttccgtctggaagtccttccataccgttgtctttatgcatcatttaaaaatcatccttggccaggcgcgggggctcatgcctgtaatcccagcactttgggaggccgacgtgggcgaatcaagaggtcaggagatcgagaccatcctggctaacacggtgaaacctcatctctactaaaaatacaaaaaattagccaggcgtggtggagggcacctgtagtcccagctacttgggaggctgaggcaggagaatggcgtgaacccaggaggcggagcttgcagtgagccaagatcgcgccactgcactccagcctgggtgacagagcgagactccatctcaaaaaaaaaaaaaaaaaaaaaatcatccttaagcatttctttcttgaaatttccttgtccccacttcctaccccttcccagacagatttagatatgtattttctacatgtccacagtatctggcacacgagtatcattagcatttgtcacactgcattataatatttgatggtggggttattggccattaaacagaacttcttaagagtaagggccatgaattatctgaattatcctccatgaattatcccccaatacctggtacagtgattggcacatgatggggattgaatgaatggttgatgaatgaaggaaggaatgcatgaacaaattagtagatttgaatcggttttacactagaataatttcctctttgctctctgcaaacacgtatatgaagaagcacttgagtgtcagtatgtatagtgttaaaatcagtgtaagctttagagctagaatgcctgggctcagattcttgcgtcttcacttaccagttgtgtaactgtgggcaaagcacctaaccttctgtgcctctgttttctcatatgtaaaaagatagtggtaatagtttccactttgctaagtgtttacttctttaatcttcaccaactctgtcataaacataattattcttatttcttaggtaagtgaactgagactcagaatgcttaaataacttcctcaaggtcacacgggttctaaaatggggagctactattctaattaaagattatctgatgctaaagccctcacagtttcagctgcactgagatttcacaattggttcttactggctggaagaaggatacagggaaatattttccttcccttagctaatttttgtcctaatgattactttctgtataagattgtaacatgaaccatgtagctttgagatattgctataattgtgctcactactgctaagctgtattgtttataccttcagatagttgaacatagatagttgagaaataaatgccaacattttcatttgaattgaaaaaaaaccacaaaaaccattatattaaacctttctatttgtgtagatattagcaattttccccaaaacaaaacaagatacattcaaattgtaaatagctcaaaatggcagaagtttattcaggatgaatttgttcaggatgtagttaaatggattctcttctccattcttgtgtgtcagattacctaaatagaggcagtggggtctccaaaactctaagagggcaacatggaagcagtagcagttcattgcccataattttctctgcagattagttcagagagcccacttagaaaggaggaaaaatgaatcaaaccaaaagttaaagcaactttctcaccttccggctctccacagatgctgctggctacagtgattctgaggattatatataactcatttaccatcccaaagtcatgaaagtagactttgtattaaaggacaattgaacaaactctggtatactaagaagcattaggagaatattagacaattgttgagtaggatatttgatatatgttctaagtcatgatgcgcatctgcatcgatatcaatttgttttcattaacttagacaattaaaatcaagaactaagttattttaagcaaacagcttcattttacattcatttatttctgctttgcatgaagcacagctgcattataatgtgatcaagcacaataaattgtgctctgttgtttatagatggaagattgtaccactcaggtacatgtacaattttaccacaagtgttttgaaagtacaagtgtgtgagattttcttctcttctgaaaataattcttactcagactttagaaactatggattttctacctcctattaccaaaaataaatgcaatgttctgggccaatggcctgaagttacttaactgaagttatttaattggtagtatcttttccaatgtttttgaaaaatatattgagtgaaatagctactgcatttaggatacttacagaatatagatatggatatatagatagatatgcagtgaacaactttgtaggtctcccctggggcacatgcatgacaattctctaggtttataaccagaagtagagggtctgtgttatagtaaatgcccatctttagatttacttgttactggcaaattgctctctacccaaattcaggataattcattcaaagagggtttatttacaaagattttcaaaggtgtagggagagggtaaaccaagtgataatgctgtgacctagggctagtggcagctgagctttggacactgctaggcccaaaaggatgataggagggaaagattccttaactctgaaagtcctgtagaaaaagttgccttcagaagagaagtaacctataattgagaaaacctggcagagagggagcctgggaaacaaattcctctttccagtctctcctctctacttccgctcttctgccaaagtccctcactggccaaacaaaatggtggccagaagacactggggtccattggtgttgaccatacaggttactttctcatagcagagagcacagaggatctggaaaggaaaactgagtatgtccagccacaaggtcaatccaagttgttagaagtatattttgtctgttgctaatgcctgctatagagtagtactccctagtatatttccatcatttaaaaaaatctatcctgtttccttgtgatcaacttccaggttgcctccaattcccttctgccactaatagtgctgtaaggcactttttttgtatatgctctcttatgaacttgaagtcttcttaggggtctaaatccagtagcagaatcaactggtcttcgggtgcatgtgtatgcttaacttgaatgagggtcctctaccctcccagaagcagtgcacaagtattgcggtatcaccacatccttgccagcatgtagcagctttgtaacttctgccactgtagtaagtgtaagtgaagtttcctgtatacactatgatacattcatgtaaatgttaaacacataagtcacatattatattctttttttttttttttttgagatggagtcttactctatcacccaggctggagtgcagtggcgcaatctcagctcagtgcaacctctgacttcctggttcaagcaattctcctgcctcagcctcccaagtagctgggattacaggcacgtgccaccacattcatctaatttttgtctttttagtagagatggggtttcacaatgttggccgggatgctcttgatctcctgacctcatgatctgcctgcctcggcttcccaaagtgctgggattacaggcatgagccactgcacccggcccacacattatattcttataaatacatgtgtagtaaaatccaaaacaaacaaacaaaaaaaaaaaaaacaaaattggattggaaagctaccattggggataagctcaaaggatatttcgacttcatataaaattttatgtatataaaatgtttaaagaagtatggcaaaatatcaacatttatgcctattgttccaatgtaagcctttaggcttatttgtgtgttcacattatgatttttacaacttcactgaagtataaatgaaatacggtaaatcacactaattcaaggtgtacaatctgctaaatgttggcctctgtatacacccatgaaccatctcaggaagcacgataatcaacatcccatggtcccaagcctttcctctgtccccaggtaaccactgacctagctttctacatagaggtaatcatacaacatgtactgtgtttgtgggggacgtatgtggctgctgttactaagcgtatgcctttgatgttcattcttgttgcctgtatcaatagttcattcttttttattgctgagtagtgttttattgtatagaaatagcatgatttctctattcacttgtcagtaggcatttgagctgtttccagtttcagggatcttaaacataaagctactaaaagcattcatgtacaattttttgttgggacacatgttttcatttctcttggggaaatacttaggagtataacggctgagttgcgtggaaagtgctatttatttacctttctaagacattgtcaagtaaatttccaagcctgttatatcactttatatttccactagcagcgtttgagagtctcagtttctctacatcctcaccaaccacttggtatagtcaatccttttaatttcagccagtctaatggatacacagtgactgagcatgtccttgatgactaacaatattgagcatattttgtgtactttttaatgtgcttctatatcttctttttatgtactttttagtgtgcttatatatcttcttttgtgaagtgtctgctcaaatattttgtccatttttattaggttaattgttttattgttaagttgtaagcattctttatatattttataaacatgctttgtctatgtgtttcaaataatttttctcagtcagtggttagcttttccattttcttaaggctctgcaaaagagaaaatgtatttaattttgatgaaatccagcttatcatttttttcttttatggttttacttttggtatgctaatctaataaatgtttgcctcctccaagatctcctatgctttgtttgtcacaggttttatattttagggtttacatctagtcctatgatcaatttttagttagtttgtgtatgtgttatgaggtataaattgtctatttttttccatacagatataagttgattcagtatcatttgttagaaagattattctttccccatcaattgctttgataatttgtcaaaaataaattgaccgtatacatatggaatagaatagacggtccagaagtagactgaacagtctgagctgtacttctttatcttttgccaacctcaaactgcaactttatagccagtcctgaaatcaggtagcgtacataaggtctcaaagttttgtacttttttgttttttttttttttttttttttagttgtttgggctttcctaagccctttgcattgactataaatttaaaaaatcaacttgcccatttttaccaaaaaaaaaaaaacctgctggaattttgtttaggattgcattgaatctatagatcaacctggggagaattaccagttccaatccatgattctggcatatctttcaattacttaggtccttagtttctctcagcaatgttttgtaattttttagtgcagagtcataaataccttttattagatttcttcctattttataacttgacattaatgtaaatgaaatgttttaagaattctatttttcaatattttcagctagtatataagaatataaataattttgtaaaaatcttgcatcttgcagattatatattatttctagttgtaattctatagattccttgagatttttgtataaacaataaaatatctgagataggaacagttttacttcatcctttctgatccttttgccttatatttaactttttttaactttagtaaaatgtttaatagacttgatgaaagagtgaatcttcttcaccttgtcctccatctcaagggaaagtaattcagtttttcaccattaagtatgatattggctatgagtttttcataaataaccattatctacttgaggaatttcttactattcctaatttgctagctttttaaaaattatgaatgagcattaattttgtcaaattatttttctgccaatattaaaataatctttttttttttagaccaggggtaggcaaactttttttaaaggccagaataaatatgttcaggtttgcaacctaggaggcaaattcaaggatattatgtaggtatttatataaccatttaaaatgtaaccatttagaaatacaaaattattcctagcttgtaagcataataaaaaacaccaggagcctggccatttttggtctatagactacagcttgacagtgtctgttttgtactattaatacctattgtgatatttttatatagttggatttagatctgtcattttattatgcgttttctctttgtaccatgtttttgttgctctgttcctctctctgtctctctttcctgcctttttaggattatttgaatatgtttgtattgcatgtgaatgtatctcttagctatcagctattcttttgtattgtttttgtggttgctttatgtattacaatatatatacctaacctttcacagtctacttggagttattattgtaccacttgacatctaatgtagaaaccttggaaccatagaggtctctttgccacctcctacctttattttatagttgtgatatgggctatatctgtattcattgaaaacttcacagacactggtataattttagtgctaatgagctatacatatttaaagaacttaagaggaaagcacagtttttacattacccagataggaatcatttctattgcttatccttcatcttgaagttacaggtttcctcttgtatcatttttcttccatctgcagaacttccttcagcatttctggtagagcaggtataagataatgaattttcttaattttttttaaatctggaaatgtcattttgacttcattcttgaaggatattttcattgaacatagaattctaagttgacagttcttatccttgagcactctaaagatgctattctactgtcttatgaccttcatagtttctggtgagaaatttgtgataatttgaatcattgtttctatggatgtaaggtattttttcctagctgttttaagtatttcttctttattattggctttcaacagttggactatgatgtgtttggtcatggtttctttgaagttatcctctgtgtgatatgttgagattctagaatctatgacttctactaaatttggaaagtttttgtcccttatttcttcaaatatattttctgttttaatctttttctccttcccttctggaacctaaagctcacatttcttatgttatgcagtaccttctgcattttgttctgtttcctttttttccttaaccatctttcttatgacattatcctattttatacaagccatgttctattgtgatgcattaaagagttgagtttcatgaaattttgtgctgcaacatacaagtacacaaatttcataaatctgtgctgtctctgagtctactccagatgctatcttctccttgtttgtagttcttttttattggctccaggtggcatttttaattgtttcttatcctcaaacaaagcaagatctcacaagagtcagtgtcagtcaagagacgcaatgatgaatggagctggcccagtgtcctgtgcacagatctagtggccacattctttctcagatcagcagtggttaatgtgtggcactcccagccaaacttacggtttctagtggtggatactttcttctccccagactgtccggtcttctaattttcccaaaagttggaacatccggatcacatttctttttgtctcttccctagagtatgttaattttggagtctgggccttgcaagttgtgctgtagctttgcttcgagtctcacatatgcctgagttcaaggctggcctccaattatccatgttattttgagaaactcgcttaatctgtcttagagtcttctttggtaaattcaggccaataatgtctccattatacagtgaggtaatatgaagaaattctgaaataatgcaagtggagcatttatcctggagcagtgaagttcacggtaactcaaactgtggctgctgtggtctccagcctcagcaatatggccatccttagtgcattttgccaccaccaatctctaactctgtctaaaattttgggagatttacattcttaggaagtggtcctgcttctgggctggaaaatacaacaccttctgcaggaagtagggctctcagggttcagtagggtcagcactctggacttctgccttgtagtcaggggacagctgtctccatatccattttagagaaaaattagaagagatagatttgggttcaggtagccagatataattttaaatcagaatgcataccccatagccacatttttgagcagagaaagcattatgtacatctatcttctttagctatctttggtctttttgttttaaaatccaggttgacatctggcttttgttaagtgtggcactgccggagttctgattattcatatcctgtccacccactcctgcacatctcctctgtttggcctaacctctctctctcactatgatatttgttgagcaaaagagctttgagagaataaaattttctgaaaaataaggaaaaactgaaatatgtttatatttataggctttcactcatgtctatgtcatcattcttgtcatttttagactgatgtaccattctgtgaacagcaaatgtgtttacaaggtgcaaactgtgtgctcatctaacttagttaaattatctaaaatgaccaacctcttcagacatagacaaattattacttttccttgtcattttgttagtagattctatatagcatttttagaccactgcagtgttcaagataataatattcaataaattataaatcaattttctcctcgttgtagaaggaagctaattgtcagaggtaatatctattaagcttcctggattaaattcatttaaaatgtgttctgttagaaaatgtgataacactttatttttagtgaccattagctaatactaaattacagcataacgcctctggaagtgcatgtgacgtccatatgaataccaaatgaactcataattatctatactataataatgaatatcaaaccaatttataatgatatactgaaaatcaaatacttctgaaattttatgttctcatcaattttaaggacgagacatgaatctagcttgttagagcaattgctggcagtcaggaagctgcgctgtgcccagtctgcaattttgttttctggtatttctggcaccagcacaatgattccaaaaactgaaaaatgtaacaacagtatgctggggaggagcataggtattcaagaaagggggtgcgtgtttctaggtatgataatgagagatttttaaaggatagaatgaaatgactatcatgtttcaaaagaagttacaacacatatgtattagttcattactaagcaactgaagaatataatacaaaatgttcagttgattaatttggaaaagtatgccaccccaaagcaggcttggccaatgacttaggaagtaaagtcttctttttttatttcaaatataaagtcattttctaagttcccctcttgtattataaaagagtaattttattgggttcataggttgtctaacttgatgtaataattaatagttatttaatattaactgattgatatttaataaaaatattgtagtgattggggtgtaaggctgccattgcaaagatgagagagactagggagtgattaggacaagtaactgggtcagcttgacctagaggggatgaagccctacagaagctcaaaaggcagaaaggagttagaggtagaccactcccactaccaaaagaaataccatttgggatgagctttctagaatataaagttgtaacaagtagcagtttacgaggcatattttagacgaagaacatagcatgaacaaattcatggagacaaaatagtactgtatgcttctagaaaaacaatatctttttgattaagaaaatattttgtgggtttgtagagttcatgcctgtgatttatgggaaggaactacaaagagacagtatgggattcccaatgtccagggtccagatacgaagttgggtgttaatttccctggtactgagcaaaggagggagtgagtgccccaaaagagaaaaggatcaaaagttcttgttacgaatgatttgagccatgctccagaaaaacgtttctcgtagcaccatgcaaaatggaatagatctagttatagaaactagtagagttcccagctaagaggccagtacaattattagaggcaagtagcaacccatggtggcactgggaagaggaagaaaagatacagatgtaacagacaagggtctgtgatattgtcaggctgcgggttcaaaatgagagtccttccacaaagtactgttgtagttgaatgaatcaatattaattgaatgaaagcattgtgctgaattttactaaattaggtttgtatagaaaaatgtaacctcatgtatatgtattaccctagtgaatatgactcattaaaattcatttaaaatgataaacatttaaaatgtaaaatgtgttacatgatgtaagtagtacaaatagctgtataacagggtcaatatattaaatatatataagatttaaacatataactattttattaaaataatctgtgaatatctagatcttctaaaaagatgatctctctgccatgcccagagcacagtaggtccactgacccccatgtagtcttggccagagcggactcttccagtctcagctcttgatacttttccctcttcactcacaatctcatcattccgcttgccaagcattgatcttggcgcatagaaggtgttcactgttatttacagaatgaagagctaatgggaggaggaaagggaaaaagcaacaaaggaggaagggaggaaagaaaggaggaagtgagggaggaagggaatgagagaggaagagaggtgctctgtatctactatctttaggaccttgcacaattaattaaactccccgaagcctgaatgcttttgtctgacaaaagaaacaataggattgctatgaaaatttaaaaaatactgtattatggcatctgcactctattgggctgatagcagcagctggaagattgctccccatcgaatcacgccacagtttaccatagacacagcacctcccctcttcctctggtctattatgagaactctgtgatggcagagatttccatgggacttgagaagttatggatggatgagtgtaagggatgaaatcactactttttagttttttatttctagcattttccagtggatttttattaatccatctgcattcccttacctgatgactgggtatgcaatgtggaaaagaataatctaacacttcactgtataaaaattgtagcttggcctcctaagtacagttctctgagcaatcagctacataccaggtcactatcacatactagtaaataaggcactctgtcactttcagtagagtactactaatttggctatcaaaattgtgtttttaggcagctgaacagaaggtagagttcattagttcatgtttaaattagagcttgttttcattctagataatagggagaacaaatgctattatttttaaattctatggaaatgtgaaaataaatgctgttcatattatatctgcctaaggctttcataaaaacagttaatttccaaaataatgtatctattatattttatgtttatgaggataatttgaaatatatatttctactcagggacttttgaactaagcagtggaacaaactgcaataattagctgaactacaaaccaaacttgaatgttaatgtgtttttacataaacaaactcttgttacaaaatattgcttgagaaacttagaaaatttttttaactttgcagctaaatcagccagccttgtcacgtagacccaggagagacagagtggggagggaagaggcggccggatcctgcacaatctcatctcctgctagaagaccggggggagcagtgagggccgccaggtggtggggcagggcagtagggaaaatcctcttcatgattccctccaatatctgtggtcagtgtaagaaggaagtcagtactgaaagcctcactatatccttatccatcttggtttcctccggaggctgtctgatttgttttctggcttcctccatttctctgacctctgggggtgttttgcttcctcttcttgacacttttgttcatcaaaattatccagggaactttgaaacatggagatgcttgggctacaccgccagagaggctgactcttgctgtggggtaagacccaggcattggtgtctttgaaaagctccatgtgaaaagtaagcaaattcttccccctacccccatttacttttagttgacatgtaataattgtatacacttattggatacagagttatatttccacacgtgtatacaatgtgtaattattactgagacatgtgggaatcctgtttcttagtcttatttgggagaaagaagtctgccaagtgactgatttagccaaaaaagagaattaattgaaggaaaacagaaagcagagagtttatttagagacacagtacactttgaaagatgaggcagagcggactgctgaaagccagaggcccccctcaccccaagagttctgcattgggttttgatgacgttgaactgtttcctgaagttcgccgctgtcttaagtctctgccatttttccttgtctagttttctggctcctgccttaagtccccgctttttccacgtctagtccccactccaggcttgtgggaccctcccttactatgagttggtgcacatgtgtgggccggtgttggatatgaattgcacccggggtctcttaggaatttccgccttatcagcatgtaggttaactgcagagggagcagtgcctggggggtcttaaggattgctccttcctgcctatgttatttcccctccgccttgctcatatctagcatgcctgtttctggtggtccctggattgtgggatcctccagacctccctttcctcaggggctccccctcctgctcatgtctagctgtctgtctactctaacacagtgatcaaaccagagtaattagcatctccatcatctcagacatttatcattgccacgtgtaaggaacattcaaattcttttaccttttgtaaatataaaataaattattgtgaattcaccctgcagtgcagtggaacatattcctcctatgtagctataatttggtatcccttaagcagcccctccttatttccccccatccccaccagccttcccagcctctagtcaccacaattccactctctacttctatgagctcatttttttaactcctatgtatgaatgagaacatgtgatatttatctttctgtgcatgacttatttcccttagcataatgtcctccaggctcatccatgttgctgtgaataataggattttattctttttttatggctgaatagtatccagctgtgtatgtacaccacattttattcatctgctgatggacattcaggttgatttcatatcttggctactgtgaatatgctgcaataaatacagagatgcagatatcttttcagtatactgatttcctttcctttggttaaatacttagtagtggaatgccggatcatgtggtgattctatttttagtttttgagaagcctccataatggttttcataatggctgtactaatttgcatttcccacatccttgccagcatttgttatttttttacttattgatgatagacattctaaccagagggagatatctcactgtggtcttgatttgcatttccctgatgattagtgatgctgagcatttaaaaaatatacttgctggccatttgtatgcctttttcttcaggaatgtttattcagatcctttgcccattctaaaagtcagatgagtttattttcctattgatttgtttgagctccttgcatattctggtgttcgtcccttgtcagatgaatagtttgtaaatattttctcctattctgcagattgtctcttcactctattgactgcctctttagtttgataaagtcccatttgtctatttttatttttgtaatctgtacttttaaggttttaggcataaaatctttgctatgccaatttcttagagcattttccctatgttttcttctagtagttttatagtttcagtttttacatttaagtctttaatccactttgaattggcttttgtatgtggtgagagataggggtctagtttctttcttctgcatatggatatccagttttcccagcacagtttagtgaagagtgtgtcatttccccaatgtatgttcttggcatctttgttgaaaattagttgattgtaaatacatgggtttatttctgggctctctattatgatgttccatttgtttatgtgtctgttttcacaccaataccatgctgttttggtaaccataggcttataatatattttgaagtcaggtagtgtgatgtctccagctttatggttttgtttttattttcttttgttttgctcaggattacttttggctcttaggggacttttttggttccatataaattttatgattgattttgctagttctgtgaagaatgccattggtattttgatagagattacattgaatatgcagattactttgatttgtatgatcatttttacaacatgaattcatcccattcataagcatgagatatcttttctttttttgggggagtggggtcttcttcaatttcttccgccagtattttgtagttttcatcatagagatcattcaccttcctggttaaatttattcctaattatgttatttttgtataactattgtaaataggattactttcttggtttctttttcagttagtttgtttttaagtgtatagaaatactactgttgtttgtatgtggatttgcatcctgtgcctttactgatttcccttatcagttctatgaattttttggtagagttttaatgtttttctatatataagatcatgctctctgtaaagaggaacattttgatttcctcttttccaatttgaatgtcctttatttctttatcttgcgtaattgctctggctaggacttccagtactctattgaatagagtggtgaaagtgggcatccttgtcttgttccagcacttaatggaaaagatttctcttttttcctttcagaatgatgctaattgtggatctgacacatatagcctttattgtgctaaggtatattcctactataccccatttgttgagagtttttattgtgaagagatgtagaattttattaaatgcttttttttctgttgtccattgggatgataatacagtttttgtccttcattctgttgatttaatatatcacatttattgacttatggtattgaaacattcttgcaaatcgataccctaacatcacaactaaaagaactagagaagcaagagcaaacaaatccaaaagctagcagaagacaagaaataactaagatcacagtggaactgaaggagatagagatacgaaaagtccttcaaaaaaatcaatcaatccaggagctgggtttttgaaaataattaataaaatagatagactgctagctagactaataaagaggaaaagagagaagaatgaaatagacacaataaaaaataataaaggagatatcaccactgaccccacagaaatacccacaatcagagaacactataaacatctctatgcaaatacactagaaaatctagaagaaatggataaattcctggacacacataccctcccaagactaaaccaggaagaagtaggatccttgaatagaccaataacaagttctgaaattgaggcagtaataaatagcctaccaaccattaaaagtccaggaccagatggattcacagccaaattctgctagaggtacaaagaggagctggtaccattccttctgaaaatattccaaacaactgaaaaggagggacttctccctaactcattttatgaggccagtatcatcctgacataaaaccctggcagagacacaacaaaaaaagaaaacttcaggccaatatccctgatgaacgttactacaaaaatcttcaataaaatactggcaaactgaatccagcagtgcatcagaaagcttatctaccacgatcaagtgagcttcatgcctggaatgcaaggctggttcaacatagcaaatcagtaaacataatctatcacataaacagaaccagtgacaaaaactacagttatctcaatagatgcaaagtccttcaataaaattcaacatcctttcatgttaaaaactctcaataaactaggtgttgatagaacgtatctcaaaataataagagctatttatgacaaactcacagccaatgtcatactgaatggacaaaagctggaagcattccctttgaaaactggaacaagacaaggatgccttctctcaccactcctattcaatatagtattggaagttctggccagggaaagcaagagaaagaaatcaaggtattcaaataggaagagaggaaataaattgtctcttttagcagacgacatgatcctcctatatctagaaaaccccaccatctcagcccaaaagtgctaagctgatatgcaacttcagcaaagtctcaggatacaaaattaatgtgcaaaaatcacaagaatttctatacaccaacagtagacaagcagagagccaaatcatgaatgaactcccattcacaactgctatgaagagaataaaatacctaggaatacagctagcaagggatgtgaaggacctcttcaaggaggactacaagccactgctcaagaaaataagagaggacacaaacaaatgcaaatatattccatcctcatggataggaagaatcaatatcatgaaaatggccatactgcccaaagtaatttatagattcaatgctattctcataaaactaccattgacattcttcaaagtattagaaaaaaaactactttaaaattcatatggaaacaagagcccatatatccaagacaatcctaagcaaaaagaacaaagctggaggcatcacactacctgacttcaaactatactgcaaggctacattaaccaaaacaacatggcactggtaccaaagcagatgcatagaccactgaaacagaatagagatctcagaaataagaccacacatctacaaccatctgatgttcaacaaacctggcaaaaacaagccatggggaaaggattccctatttaacaagtgatgctgtgagagaactggctaaccatatgcggaaaactgaaactgggtcccttccttacacattatataaaaattaactcaagatggattaaagacctaaatgtaaaacccaaaaccacagaaaccctagaagaaaacctaggcaataccattcaggacataggcatgatcaaaggttttatgatgaaatcaccaaaagcaattgcaacaaaagcaaaaattagcaaatggaatctaattaaactaaagagcttctgcacagcaaaggaaactgtcatcagagcaaacaggcaacctgcagaatgggagaaaatttttgcaatctacccatctgacaaaggtctaatatgcggaatttacaaggaacttaaacaaatttacaagaaaaaacaaacaactccatcaaaaagtagacaaaggacatgaacagatgcttctcaaaagaagatgtttatgcagccaacaaacatgcaaaaaagctcaacatcactgatcattagagaaatgcaaatcaaaaccatgatgagataccatctccaccggtcaggatggcaattattaaaaagtcaggaaacaacagatgctggcgaggctgtggagaaatagaaacacttttatactgttggtgggaatgtaaattagttcaactattgtggaagacagtgtggcttttcctcaaggacctagaaccagaagtatcatttgacccagcaatcccattgctgggtatatacccaaaggaatataaataattatattataaagatacatgcaaatgtatgtttattgcagtactattcacaatagcaaagacatggaatcaacccaaatgcgcatcaatattagactggatcaagaaaatgtggtacatatacaccatggaatactatgcagccataaaaaagaatgagattacttcctctgcagggacatggatggagctggaagccatcatcctcagtaaactaacacagcaacagaaaaccaaacaccagatattctcactcatgagtcggagctgaacaatgagaacacatggaaatggggaggggaacaaaacacaccagggtcagaggagggagagcatcagggtaaatagctaatgcatgtggggcttaatacataggtattgggttgatacgtgcagcaaaccaccatggagcatgtttacccatgtaacaaacctgcacattctgcacatgtatcctagaacttaaaattaaaaaaagcaaagcaaacaaacaaacaaacaaacaaaaaaatgaaacattcttggatccctgggatgaatgaaactggatcgtggtgtactatctttttcatgtgctgttgaatttgatttgccagtattttgttgatgaatttattgatgaatttccctatgttcattgctaatattggcttgtagtttcctttatttgttgtctttgtctggttttggtatgagggtaatgctggcctcatagaatgtgtttgggagaattctctcctcttcagtttttcagaattgagaaaaatctgtgtttggtcttttttaaaagttcggtagaatttgtcagtaaatccatttgggctttttttgaggggagactttttattatggcttcaacctctttgttcatcattggtctgttaaggttttctagctcttcttggctcaattttggtaggttatatgtgccgagaaattcatccattttctctaggtgttccaatttgttggcatatagttgttcataatagtccctaatgatcctttgtatttctgtggtctcagttgttatgtctcctttttcatttctgatttaaatgtatgtgggtcttctctatttttttctagtctagctaatggtttttttcataattttaaaatattctccaaagaaactatttttaaattttttgtattgatacataatagatttgcatattttctgggtacatgtgataattcaatacattcatgtaatttgtaaagatctaatcagtgtgactgtgatatccatcaccttaaagatttgtcttttctttatgctagaaagatttgaattattctcttcttagctattttgaaatatgcaatagatcgttgtatgctatagtcaccctacagatctatcaaactccaggccttattcttctatcatattgtatatggctatatgtatgtatgtttttattttctccccctactccccactctttccaacctctggtaacaaccaatttgttttcttcttaataaggtccacttttttttttagctcctacatataagtgagaatgtatggtatttgtctttctgtgcatggcatatattacttaacataatgaccatgagttccatccatgttgctgcaaatgacaggatttcatccttttttatgctgaataatactccattgtgtatatatgctacattttctttatccagtcatccactgatggtcacttacgttgattccattgtttgcctattgtgaatagtgctccaataaacatgacaatacagatatctctttaatatattgattccctttcttctggataaatacccagcagaggaattgctggatcatacgggagttctatttttagtattttgaggaaccttcatacagtttttcttactggctgtactaatttacattccccccaacagtgtaaagagttccccgttcttgacattcccaccggcatccttaatttcctttttggtaaaaggcatttaactggggtaagatgtttcattgtggtttgaatttgcatttctctgattatacacccattggctatttgtaagtcttctttggagaaatgtctattggatcttctgcccatttttaaattgtattatttactttttgttattgagttgagtcccttataattctggttattaatcacttgtcagatagatagtttgtgaatattttctcccattctgtgggttatctcttcacttggttgattgtttccttgctgtgcaaaagctttctagcttgatataatcccatttgtccatttttgctttgatcgtctttgcttctgaggtcttacacaaaagatgcttacctagactcatgtcctggagcattttccccaatgatctctccgggtagtttcacagtttggggtcttaaatttaagcctctaatccatttttatttgatttttgtagatggtgagaggtaggggtctaatttcattcttctgcacacacatgtccagttttcctagtaccatgtattaaagagagtgttcttttcccattgtatgttcttggcaactttttcaaaaatgagttggctgtaaatgcatggatttatatctgggttctctattctgtttcattggtctatgtgtccatttttatgccagtaccatgctcatttggttgctatagcttcgtaatatatattgaatctagtagtgtgatgtctccagctttgttttgttttggggtattttctctgctcaagatttctttgggtattttgggtctttcatgattccatataatcttcaggatttaaaaaaatatatatttctgttaagaatgtcattggtattttgataaagattgcattgaatttgtatgttgctttgggtggtaactttaacaaaattagttattccaatccatgagcatggagtatctttttatttttttctggtctctccaagtccttttatcagtgttttatagtttcccttgtatagatctttcactccttggttaaattgattcctagatattttatattctttgtaacttttgtagatgggattactttcttgatttctttttcagattgattgcttttgacatatataattatgactgatttttgtatgttgattttgtatcctgcaactctactgaatttgtttattagttctaatggtttttttgcagtaaatctttaggcttttctatatataatatgatatctttgaacaagactaatttgacttcttcctttccaatttggatgccctttgtttatttctcttacctaattgctgtagccaggacttccattattacattgaataaaagtagtaaaagtgggcatccttttcttgttccatatcgtagaggaaaggctttcaattttccctgttcagtattatattagctgtgagtctttcatatgtggcctttgttatttttaagtttatttttctataccagtgtgttgaaagtttttatcataaaggaatcttgaattttgtcaaatgctttttcagtatctacatggtttttttcttggtactgttaatatgatgtatcacatttattgagttgtatatgtggaaacctccttgcatccctgggatgcatgccacttgatcatggtgtattatctttttgaagtgcttttggattcagtttgctagtattttgttgataattttttcatatacgttcttcagtgatatgggcctatagttttctttttttgttgtgtccttgtctgattttggtatcagagtaatgctagccttacagagtttgcaagtattctttcttctacaaaaaatttttgaagagtttctgtttaattgttttaaccaatttttgattgaattgttttcttattgatttatgagagttctttttatatatctggattcaacttctttatcagatgtatgctttgcaaatattttcttccagcacacaagttgtctttttgttctcttaacagtgcctttcaaagaaaagatatttttaaaatgtttacgaggtccagttttatcaatttattctttcatggatcatgcttttgatgtcatatataaaaaaaaatttgcctaacccaaggtcacaaaattttttcctaggttttcttctagaagttttatagttttatgttttacatttaggtccatgatagtttgagttaaattttgtttatgccatgagatatggatcaatttttgcagttgatatgatatgcagttgtttcagcaccatttgttgaaaagattatccttcttccattggattgcctttgtacttttgtgaaaaatcagttgtctccaaggatatacagaaagcaaataaacatatgccaaataccacatgattagttcattaggaatgaaaattaaaataacagtgataccactacacacctattagagtggctacaatgaaaaagacttattatgtcatgtgttggtgaggatgtagaggaattggagcattcatccactgttgatgggaatgtaaaatggtacaaccaatttagagaacagtttgccagtttctcaaaaagtcaaagatacaaatgccatatgtagagccatttcacttctaggcatttatccagaaggaaagaaaatgtatgttcatacaatgacttcgacatgaatgttgataagggctttatatgtaaataccctaaactggaaataacccaaatgttcacctacagttcttgggtaagcaaatgatgatgtacgcatactacagactactactactcagcaataaaaagaaatgaattactgacacacttaacagcatggatgcatctaaaaaaagtaatgttgaataaaagaaaccaaacaaaaaggagtacgtactttatgtttccatttatataaaactctagaaaatatacgtttattacatttatagtgacagaaagcatggggtgggagaggtaagagaggaatcgtaaagaagcatgagaaaacttttggggttgatgggtatgttcttcactgaagtgatagtgtttcatgggtgtacacatctgtcaaaacttatcaaattgtatactttaatagtacatttttcaatattaattttacttcaataaagcttctaaaaacacacaatttttttttgaagagtttgagtataattggttttagttctttaaacatttggtagaatttagcagtgaagcaactgggtcctgggcttttccttgataggagacttttcattatagcttcaattttgttacttactattggtttcttgaaattttccatttcttcatggtttaatcttagtagattttatgtgtccagaagcttatcatttttttctaggtttctaatttgtagttgtatagttgtttataataatctctaattatttgtatgtctctgatcatatttgttaagtgtccttttcatttctaattttacttatttggctcttctctctttttttctttgtctagctaaaggtttgccaattttgcttatctttaaaaaacagccttttacatcttcagatttctaaaatatttttgtctttgtttatttctgctctcatctttataaacgttctaaaaattttgggtttagctttttttttcttgcttttctaattctctgagatacatcattaggttgtttatttgaattctacttttgatttaggtgtttattgctgtaaactttcctctgtgtacagagtttcctgtatctcatatgatttggtatatgtttagtgtttttattttcactagtttcaagactttttaatatttacttcttaatttcttcatagacccatttgtcattcagaagcatgttgtttactctccgtacatttgtattttcaaagttcttattatttctggttttattacattgtgatgtgagaaaacaataggactttcatttcttgaaatgtgttgagacttgttttgtggcctaatatatggtttatcctggagaatgtttcatgtgctgatgagaagaatgtgtatattacagttgatgaaatgtcttgtctcttaggtacatttgctctgtagtgcagtttaagtccagtgtttcttggtgaattttctgtctagatgatttttccaaacctaaaagtggggtattgaagtccccagcttttattgtactgaggtttatctgtctctctttagctaatatttgcattacatttgtgggtgttttggtgttgtgagcataaatatttacaattgttagattatcttgctaaatttatcattttatcagtatataatgactttctgtatctttttttttttttttttttttttacttaaagtctgttttgtttgatataattacactactcctgcacactcttggtttccatttgtgtggaatattttcttccatttgtcttagtccatttagagttgctttaaagaaatatccaaggctgggtaattttggggaaaaaaaaggttcgtttagttcatggttctactagaaagttcaggattggatttctggcaagggcctcaggctactttcatcatggtggaaggcaaaggtgaacatgtgtgtgcagagattacatagtgagaggggaaacaagagagagggaagggaggtgctaagctgtttttaacaaccagccttcacataaacgaataagaatgagaactcacaactgggcgcggtggctcacgcctgtaatcccagcagtttgggaggctgaggtgggcagattacctgatgtcaggagttcaagaccagcctggctaacatggtgaaacccagtctctactaaaaatacaaaagatagccaggcatggtggcacactcctgtaatcgcagctactcggggggctgaggcaggagaattgcttgagctgggaggcggaggttgcagtgagccgagatcatgccactgcactccagcctggccaacacagcgagactgtctcaaaaaaaaaaaataaataaatgaaaaaaagagaatgagaactcacttccctggttgggagggcgggcgttaaactcttcatgagggatctgcacccatggctcaaacaccttccattaggccccacctttaaaattggggatcaaatttatacttgaggttcagggtgacaaatatccaaactatagcaccagcccttctctttcagaaagtctgtttccttgtaggtgaaatttcttttcagcaggatatagttgtttcactgtgtttgttttgttttatttatcatgtagccagtctatatcttttaggtggggaatttaaaccctttacattcaaagttgttattgtattcattttgctaattgttttctgattattttgtatatcctttgtttctttcttcctcttttattgtttatcttttcagtcttgtggttttctgtagtgttaatgtttggctcctatctctttctcatttgtgtattgtggcagaatatgaaactctgccaatgagttttatattttcatgtgttttcatgatggtagatatcatcctttcactcacacatgcagggttcccttaaacatttcttgtagcactagtctagtggtgatgaatttccctcagtttttgcttgtctgggaaagattttatttttcatttatttatgaaggatagctttgctgggtataacattcttggctgatagttgttgttttttctttcagtactttgaagatatcatcctgttctctccaggcctgtatggtttctgttgagaaatctgctattagtctgatggggattctcttgtatgtgattggatgcttttctcttgctgttttcataattttctcattgtctttgacttttgatagtttaactataacttgccttagagaggaccgttttgggttgaatctatttggggatttgaacttcctgtatctatatgtctaaatatctttctagacttgggaaattttcagctattatttcgttaaataaattatctaggactttttctatttattgttcttctggaactcccaaaatgcaaaacttttttcacttcgtggtgtagtgatgtcccatgtgtcggataggctctcttcattctgttttattctttttttttttttttttgactacgtaattttaaagacctgtctttgagttgagaaattctttttattcctgcttgatgtagtctgttgttgaagttctcaattgtatttttttttatttccctcattatatgtttcagttacaagatttttgtttggttcttttatatgctatttcttttttaaaatttctcatttggataatgaattattttcctgatttatttcttctgtaacctgttgagttttcttaagatcattattttggatttcttttcaggcatttcatagattttcttttcttttcactgttactggagaattattgtgttcctttggaagtgtcatgttttcttgtttttcatgtttcttgtgaacaggaacatttctttctgagaaattagagatcattgaaaattgcaagatagtataacttaatgtttgttatcatatattgaatattaccaaatttaaacttcaagttcaaagactactgggagcaaaatgaaacatacttcaacattactgttcttcaaaatcaagccatcaccagtgctgtattagtctattttcatgctgctgatgaagacatacccaagactgggcaatttacaaaagaaagaggtttaatggacttacagctccacatgcctaggaaagcctcacaatcatggcagaaggcaaaaggcacttcttacatgacagctgcaagagagagaatgagagtcaagctaaaggggtttccccttataaaaccatcagatcttgtgagacttattcactaccatgaaaacagtatgagggaaaccacccccatgattcaattgtctcccatcaggtccctcccacaacacatgggaatcatgggagctacaattcaagatgagatctgggtggggacacagcgaaactctatcgagtgctcacacatgcagaagaattgcatagacttgccataagtagaatctcaagctcaattttgtttataaatgtattaacttaaacaatctttgctattcactcaacatgatatgtttttggtaaggcttagtgtgtctcaaagctattaatatagtgatatagccaattccattgagcaagcattgccttgcagtgcctaaaaatatactcagaattggtagtgagaggacattctgatactgaatcttgccaaacacactatattgcagaaaatgttactatattatccaaaaggtaaatgatcccttgccaatttattgtttccattataattttatattttaattacttaatattatatattgctttgttaagcatgcattctaaatattgcttctgttgttaatagactgctttaacaattatcatggtattaaataaaaagcaaataattcatttgaaaagtatatatctgtaattgttcagaatttttttttttttagtttggcttatagagagacccatttactttcatggtcttactaagatgtgcatttctaaaatattttagaaatcatgcatctatacaactgggttaagcattcaatagagagaggtcaaggccatcttttcagtttctgacttaaataagagaagcatttgaaaaaggatacttttctcatgagaacgagataaatgagttgaatttgaaatacactgagtttgaaagtgccagagtagaaaaggaataagttgatttgaagttcaaaagaaaggtctagactgatgtcatttgtcagaataactgaaaaggcatgggtggagcttagacaatcctgatgaaccttgaagagcagcactgttcaatagaaatataatatgaatcacgtattattttatattcttctagtagccacattttaaaaagtaaaataaaattggtaaaattaactttaatgaattaacctgatatattttaaatatcatcttaacatgtggtatcagccacatttcaaacacaaccacaggtagctgctggctgctgtgctagacagtgcaggtgtagagagagaagggagtgctaagaacaaaacctgtgggatcccaacactgaaagaatgcgggaggatgcagaagaccctcacatggaggccaagagacacctatctagatctcagcttgtccacaggcggtgagcagcatcttcacatctatgtctcgggtgttactttctagatgggtgacacttgcagggtgaattaggagatctctcattctgtcagtgacgtagacctccctccccaaaccagtttccattgtaagtatggtcgtatttgccctaggttacaaattagccagagcccttgtaatgtaaggcttgtgggtatatttaccaaccacatcttaatcaaaatagtgtaatgtggtagcatccctgtaacaatattaaccatttagtaacatattctgttgtctcggttggaccaaaacttcaaatctaggaagtgaaaatttgagaaaagtataaaacaacaataccactcccttgcttagtgctttggggtttatttgcagtcattttttaatttttttttttattttcataggttattggggcaaaggtggtatttggtcacaagagtaagttctttagtggtgatttgtgagattttggtgcacccattacccaagtagtatacattgcacacagtttatagacttttatccctcacccccttcccatccttttcccctgtgtccccaaggtccattgtgtcattcttatgcatttgcatcctcatagcttagctcctacttatgaatgagaacacacaatgtttggttttccattcctgagttacttcacatagaataatagtctccaatctcatctaggttgctgtgaatgccattaattcattccttttttatggatgaatagtattccattgtaaatatataccacagtttctttatccactcgttgattgatgggcatttgggttggttccatgtttttgcaattgggaattgtgctgctataaacatgcatgtgcaagtatctttttcgtataatgacttcttttcctctgggtagatacccagtagtgggattgctggatcaaatggtagttctacttttagctctttaaggaactgccacactgttttccagagtggctgtactagtttacactcccaccagtagtgggattgctggatcaaatggtagttctacttttagctctttaaggaactgccacactgttttccagagtggctgtactagtttacactcccaccagcagtgtagaagtgttccctgttcactgcatccatcccaacatctattattttttaatttttttgattatggccattcttgcaggagtaaggtggcattgcattgtggttttgatttgcatttccctgatcattagtgatgctgagcattttttcatatgtttgtttgccatttgtatgtctttttttgagaattgtctattcatgtacttagctcactttttattggaattgtttggttttttcttgctaattcatttgagttctttgtagattctgtatattagtcttttgtcagatgtatagattgtgaggattttctcccactctgtgggttgtctatttactctgctgactgttccttttgccgtgcaaaagctctttagtttaattaagtaccagttaggcaatagtcaccaagcagcatggtactggtataaaaatgggcacatagaccaatggaacagaatagagaacccagaaataaatctgaatacttacagccaactgatcttcaaaaaagcaaacaaaagcataaagtggggaaaggactccctattcaacaaatgataattgcccagccacatgtagtagaatgaaactggattcttacctctcaccttatgcaaaaatcaactcaagatggatcaaggacttaaatctaagacctgaaactataaaaaacctagaagataacattggaaaaacccttctgacattgacctaagcaaggatttcatgaccaagagcccaaaagcaaatgcaataaaaacaaagataaatagctgagacttaattaaactaaagagctattgcagccatttacatccagtatctcatttgggcccagagccaacctgatgaggactcaaagattatttcaagggagggaaaagcacaggtaatgaggctttcttctttttggtgtttttctttattccttactcttcttgctcttctctacttctttcatctcatctctcctatcttttttcctcctttctcctattctttgttctccttattccttttccattaattttacatctcctgtatttgacgtgtgtgtgtgtgtgtgtgtgtgtgtcacttagctgattctagcatgttctggtaatgaatgttttctatctgttatattgttgaacactgcctttggtgctgggcttttattttacttcgatttaagcaatattttaaattcataatttcatttaagttgctaatttgcaaaatttatttagcgcctgctgtcagtctttttcttaaattaagaaccatacagtaaattagttcatactggtaattatattttctaaaattattgaagcaaatcaaacccagaatgtcaaagtattttctcaaatgaagctaagccaaacccattatttaagtttgttgctaattctaactgcaaataaacactcagtataatagatttctatactttttctggatcatggatcaggagccatggactattatagtcataaagaaacatcaagagcaactttttcaaatatctcattttatagatattcatgctaacgctcagaggggtgccctgatatgctcaagatcaggcaacaaatgagaagtagaggcaggtttagaagaaaaacttaagagagaactcaaacttactgccctacactctgttctaggcaaggcagagattgaggcccctcttctccttggctctctgacttctattttgtttcctgctctttatatctgactgtcattagtgggtggttctctatgttctctctctccctctctctctctctcctgcccatttctcctatctctctctgtctgtctgtctgtatgtgtcttctttctcttcttcctttctgtgtgtgatgttttatctctgtgtgtctcttttatctctctctgtcctctctatttgagtccagaataaagcaaaaggagtaagtggaatgtttccctatgaatcagatggcagcagaaagggatttgtttttcacaagacttgaaagtcccacgtgaagctctcccgctctgctccgtgcctggaccggctgctgctgtcagcaggccttgtttctcaccagcagcaggggcaagtgacagttgctttttctgcttcgggtttgattttgtgggcattttatcattggaggggtgaaatgttatgaaggaagatgacaacaacagttttttgtcatattggcaaacagggtcattactgtacattcgtaaccttagagaaatgagtttttactggactatcagaaactacagcacaggatataatgaatgtatcagagctcagaatttgtttttaaatgaaattacgtggaaaaatgtaccaatccttaatgaatgtaatcactgtgtttttcttcctggcatgtgtgtttgtgtgtgtgcgcgtgtgtgtttgtatatgtgtgtgtttgtgcatgtgtgtgtgtgtgtgtgtttgtgtgtgtgatcatgcatacacacaatccagtatcttccaccgggtgtccccacggcttctagcctttggggttaccctcttctctaatattaaagagaaactcaagccctcatcccacggactgtgagagattgggtggcttgttttcctccttcttctctccagtagtcccaaggatttttaggaggttatttcatttcttctggctcccgccctgtgactccctgttctgttggattctcagtccttcctttgcgtcttgtatccagcacatgacgttcccttccacgtgtgccacatgctgccctggattctttcatgtcccaaagtactgcgagtgcaaggtcctgcacgccacaaaatttcactggaggtttggggacaggcctggcgagttaagcacatcacagtgaaaggaaatcagatcagagtaaaatgaaatcttagacagcaatgccttcacaattcacctgcattttcctggcaggaggagtttctgggtgattttactgtcattgttgctgttggttttgcctgctatgcctcctttaagcctcgctgattattccacactctccccatgcactttctttttttatgttaattagctttatttaatcatgctacattgtatgcatatttcaagacattgtaccccataaatacatacaattataatttgttaattaaaaacttaaaaagaaatttaaaatgtagtggctgaaaagaataaacagaaatcaaataaccatgttagagattattgttaaactccataaaagttatcagtttgaactttaaaagaaaaaaagccagttgctttcattactagtttgagctttgctctacccagctgtaaaaattcctccctttctataataaatgtccactcaccctctcactagctgccagattcaaatcccaagctgctattcttttccatgtcaagcacttgagctattcaacccttacctcagagtagaatctaagccacctttgcagaaccaaaattgaagctttgctaaataaacagtctaaaactccctgtctaacctttcgcaccaaaagaaacctctatggaattttgaaatcatagtttctttaacatgatcaaaatcttaggcaagtttctttaatcagggttagagtagagctattctctccacatactgaataagacctaggggagggaggattatttttcagtttgtgaaaattatcactggtattgctttcaatatgacttcctgtccccctctcttcttcagggactcaaataacaaagtttattagacctttctttctgtttcatgcatctcctactatgtttacttttcattctatttttttttctctgcatttacctgggtattttgtactgacacttcatccagttctttattcccctattcagtgtggataaccagctcccaaacctatatattaaatccctaatttcaaaatattatagtgtttttccattctagaatttctatttgattctttctgtatgttccagttctttggaactggacggaaactcttcacattttcctctttttgaacatatttgtcataattaaagcccatatgttataatgatacctcattcacctgttgattactctgaattatttttttcttgggtttcagtcatttggttttggcttctggcatgacttgtaatatttgattgattcagtgccagaaatcgtatatggagggggcttcaagatagctaactggaggtatctggtacttgcctcctccacaaagaagaaccaaaatagtgagtagataatcaaactttgaatagattatctaagaaagacactggaattcaacaaagaagtgacaggaaacacctaaggcaaaaaaggagagagaagcaaggcagccagctcagctgggattggccaggagcccagagaggctcccagtgcagggaaagggtaagtgagagacccccagctgaccacattcccaccatggacttctgcaatcctagtgactcaacccctgcaggctctgagactaacatggggagctgcctggaaactctgtgaccgcattgctcgagagaagctcatgctggctcccacacacacccttatgtcttaagtggctacaacaaagtgccactttgagagcccagcccccagcagaatgcatcctgttctggggacccatggccccacatctttacatccctgaggcccattgatatcccccatccatagctgccatcgctgctggctgctgttaccagggccaaagcaccagcccttggcagcactctcaccaccagcagcagtgggctgttgtgcatttataagtgccctgaggacaaggtaccctgcctgccaccaccaccaggctgaagtgcacactccccagctgcctgcgtatggctgctgccactgaaaaagcaaccctgctctcctcagtagcagggccgcagtgcagccgctggttccccaacccaggcatttcactgggggcctggggatcaccctgtcactgcctaccacagccagtgcctgcaggcaccacttggggagcctgaggacagactcacttagcctggctccaccacctccagtgcctgagctcgccgtctgggtacctgaggattctcctgccctgtgcaccataggcacctgagcatctctcccagggacctaaggacaggcttacccaacctgccactaccaccacagctggcacccacctacatgtgctaccacctgtgggcctgaggactggcccacccagctcattgcagccgccacagaccccagcatggaccacttggaaaccagaggattgtcatgctgctactactgccattgctcacaccacacctgccatccaggtgcctgaggacccacccacctgcccagcccacagctggcaccggagaaagccacctggaggcccaagaatatgcctgcctggtcctgctagcgctagtaccagcatagcctaccctgaggctgaaggatgggtattcttggcccgtcactgccaccactggggcctgtggactggcctacctgtcctccttatctcagcaaaacttcaccatagcttctagtaataactaccgtaagccactgaggaaattacagataccactgatgctgtttacagccaaataaatcatagagaaactatactactgcatatatccagaatcaaagccaaagtgcactaccaaaccaacatcataggtacatcttgaggaaaaaatccttccttagcaagaaaattcaaacaactggagaagtgactgttgtgtcagatgtgcacatatcaatgtaaggacacaagaaacataaaaaagtggggaactatgacacctcaaaagaaatacaataattttctagcaacacattccaaagaaaacaaaatttatgaaatcctgggaaaagaatttaaaatagttatttgaaaggaattctgtgagatgtgaaagaaaacagataaataatacatataaatcagaaaagcaattcaggatatgaataagatgtttaccaaagagatagatattataaaaagcatcaaacagaaattctggaactgaacaatttattgaatgaaattttaaaatatgtttgaaagctttaacagtagactagatcaaacagaagaaacaatttcaaaatcgggagacaggtcttttgagataacccagtcagacaaaaaaaaggaaaaaggattaaaaaaatgaacaaggactttctgacatataagacaccataaagtgtccaaatatttgaaattttggtgtaccagaaggtgaagaaaaaaacaaacaaaaaaagggatagaaaacttatttagccaaataatagctgaaaacctcccaagtttagaaagatatttagacatacagatgaaggacatttactgatccccaaatagaaagtgtaaaacctatgggtaaaaataaatagaagactgaaatgttaccactacagaaagccaccaaacaacaatgctaaacattaacagagaaaaaaaaagatatagaaaacaagcagaaatcaattaataaagtgacagcaataagccttcacatatcaatgataaccttgaatgtaaactgattaaacttttcacttaaaagttatagactgactgaatggataaaatacataacccaactgtatgttgcctacaagaaactaatctcacctgtaaagacacatatagactgccagtaagtgatggaaaaaaatattccatgcaaatggaaaccaaaaacgggcagaagtagctatacttatatcagataaaataagctttaaataaaaaacagcaaaaaatgaaggttattatataataataaagggatcaattcaacaagaggggtaacaattttaaacatatgtgcacccaccaacagaacactcagatatgtaaagcaagtattagttttaaagggagagttagagtccagtacaataatagttgagggtttcaacaccccagtctcagcattagacaaattgtatagacagaaaatcaacagagaaacattgaatttaaactgcagtttagaccaaaaggacctttggtatttatagaatatttgaactgacagctgcagaatacacattcttctcatcagcacatggaacattctccaggatagttcatatgttaaacctcaaaacaagtctcaacaaattttttaaaaattgaaatcatgtcaagtattttcttagaccacaatgaaatcaaactagaaatcagtaatgatgaactagaaatcaataacaatggaaactcttcaaacacatggaaattaaacaacatgttcctgaatgaccactgggtcatggaagaagttaaggaggaaattaaaaaatatcttgaaacaaatgaaagtcaaaatgcaacataccaaaagctatgggatacagcaaaagcactgttcaaaggaaagtttatagtgataaatgcctgtgtcaaaaaaatagatttcaagtaaacaatctaatgatgtatctcaaggaaatagaaagtcaagaacaagccaaaccccaaactagtagaaggaaagaaataataaaggccagagcagaactaaataaaatagagacaaaaaaaggatcatcaaaacattgttttaaagatcaacaaaatcaataaaccactagctagagtaaccaaggaaaaaaaaatgaaaagaaaacctcaaataaaatcagaaatgaaaatggagacattacaactgataaccaccaaaatgcaaaagatcatcagaaactattatgaacaattatacacttacaaactggaaaacctagaggaaatagaaaaattcctggacacatacaggctacaaaaattgaatcagaaagaaatacaaaacctgaacagactggtaataagattagattgaaacagtaaaaaaaagtctcccaacaaagcaaagttctgcacctgaggctttactgccaaattctacaaaatttacaaagaagaactaacaccaattctcaaactattccaaaaaatcaaagaggagagaattctcattaactcattctaagaagccagcattacgtttattccaaaaccagtcaaagatggaacaaaaaagaaaactacagaccggatgaacatagacacaaaaatccccaacaaaatactagcaaaccaaattcaactgcatatcaaaaagataatataccatatcaagtgggatttatcccggggatgaaaggatggttcaacatatgcaaatcaataaacatgatacatcaaatcaacagagtgaaggacaaaaaccatatgatcatctcaatagatgtagaagaagcattggataaaattcaacaactttttatgttaaaaatttctgggaaagtaggcatagaaggaacataccttaaaataataaaggccatatatgacaaacacacagctaacatcatactaaatgggcaaaagctggaagcattccccttgagaacaggacaaggataccactctcaccactcctattcaacatgctactgaaagtcgtagccagatcgtcaggcaagagaaagaaataaaagacatccaaatgggagaagaagccaaatcatccctctttccagatgacatgtatgtgtgtgggtgtgtatgtatatctatatataatatagatatataaacatatatcatatataatctatatataaccatatataatcatacatataatcatataatatatataatcatatataatacatataatcatatatataatgattacatatatataatgtaatcatatataatcatatatataatcatatataatatataatcatatataatcatacataaaatcatatatataaaatatatataatcatatatataatcatatataatatatatataatcatatatatactcatatatatataatctatatatataatcatatatatactcatatataatcatatatatataatcatatatatatactcatatataatcatatatataatcatatatatatataatcatatatatatatatatatatatatatatatatatatacacccaaagattccaccaaaaatctcctagatctgataataaattcagtaaagttgcaggatacaaaatcaacatgcaaacatcagcagtgtttccattcaccaataataaactaactgagaaagaaatcaagaaggtaatccatttacaatagctacaaaaataaataaataaaatctagagataaatttaaccaaggaggtgaaacacctctacaaagaaaactacataacactgatttaaaaaattaaagaggacacaaacaaaggtcacccatgctcatggattggaataattaatattgttaaaatgaccttattacccaaagcaatctacaaattgaatgaaatccctatcaaaataccaatgtcatttttcacagaaagaaaatataattataaaatgtgtatggaactgaaaaagagcctgaatagccgaagcaatcctgagcaaaaagaaccaagctggaggcatcacactacctgacttcaaaataaactacaaagctttagtaaccagaacaggatggtattgatataaacacagactcatagaccagtggaacagaatagagaatgcagaaataaatctatgtgtttacaaccagatgatttttgacataggtgccaacaacatacatagggggaaaacacactcctcatcaaattgtgctgggaaaactggatccgtgttcagaagaacgaaactagacccttatttctcaccatatataaaaaccaatccagaatgaattgaacacttaaatgtaagacctgaaactaaaaactagaagaaaacagaaggggcaatgcttcaggagattggtctaggaaacgattttatggctaagaccttaaaaccataggcaaaaaaccaaaaatagacaaattggactatatcaaactaaaaccttctacacagcaaaggacacaatcaacagaatgaagagacagccttaaaaatgagagaaaatatttgcaaactattcatctgacaaagaactaatatttagaacatgcaagaaactcacaagtcaacagcaaaaaaccctaataatccaattttaaaatgggcaaaaaatccaaatgaacattcctcaaaaaaggacaaacaaatggccaagaagtatataaaaatgctcaacgtcactaagtattggggaaatgcaaatcaaaaccacaataaaaatatcatcttactccagtgaaaaagaccattatcaaaatgtcaaaaaataaatgccggtgagcatgtgggaatgtaaattattatagccagtatggaaaacagtatggaaatgactcaaaattttaaaaacagaactgccatatgatatggcaattttactactcggtgtttatccaaaaaaaaggaaatcagtatatcaaaaagatatctgcaccccatctttattgcagcactactcacaacagctatgaatcagcctaattattcctcagtatatgaatgcattttaaaaatgtagtacatatacatggaatacagtggaatactattcagccttaaaaaaattgaaatcatgtcatttgcagcaacatggaggactaggaggtcattatgttaagtgaaataagccagtcacagaaaaattaatagtgcatgttctccctcatatgtgggagcttaaaaaatgttggttttatggaggtaaagagtagaattatagataccagagactgggaaggatgtgcaggtagttgggcaggaatgaaggggttgtttaatgggtctgtacaattacacaggaagaatacagtgtaatgttcaatagcagagtagggtgactatagttaataacggtgtattgtatatctcaaaggagctagaagggagcagttgaaatactctcaactcatagaaatgatgtatctctgaggtgctagatactataaataccctagcttgatcacaagtgcctgataaataggtacacatattatgtgtcaagttttaaaaagaaaataaataaactgtgtatgaaaaaatttaatgacattttatttccccagtgatacatacttttgagtgaaaaatagagtgagggcagaaactaagtcagattcttggaggctgtgatttaagttttgtgagggtttgttgtatttccaatttctcttactcctagggcccagctctgaagagggctgaactggcaggtgtttaccaggtactaaaatgtcttaatttctgcttagatttttagccttttaacagatgctgtctgcatggtttctgggcctctctcctaggatgtggaactgaaagactggcaaatgtctctaagggaaattgcattagatgaaacataaaaactctgagcaactttgatcctgaaagaagttttgattttgcaatggtacatattttacacctgtttttaaataatttttagtgttttttaaaaaattaagaaatcacattatgaatccttgtgaaaaaaattatctttttctaagtttttgtttccattttttctttgaacattttgatttttatgtattaacttttactgatatgatgcagtaattattaaaagtagtcgaacaggctgggcacggtggctcacgcctataatcccagcactttgggaggccgagacgggtggatcgtgaggtcaggagatcgagaccatcctgactaacacggtgaaaccccgtctctactaaaaatacaaaaaagaaaaaaaaaattagccgggcgtggtggcgagcgcctgtattcccagctacttgggaggctgaggcaggagaatggcatgaacccgggaggcggagcttgcagtgagccaagatcatgccactgcactccagcctgggctacagagcaagactccatctcaataaataaataaataaattaattaataataaaagtagttgaacagatcatattttgtacagtgaatttcatgccttctcatctccaaattaaaatatggttttggatatacgttcatgattcaaaatttgtttcagtatttaaagcatattaatcctttcaagtctatttttcttggtaaatgaattaaaggaaaaaatactacaaatatctaattgttcctgaattcaatacaaactgatattttaaacttgtaaaatgtatatgggaaaaattcaatataaacattgaaaaagctctttcagtgtagaaagggctaatagttaaaaagaaaagcctagacagagtggacaagataaaccagttgatgaaaataagcttgttctagcacttagtgaaacaagtgaacaaagattggggactgcagtacagcttttaattaatataaaaaatttaaaacagacggagtgtttaatttgtctctgaatatgagatgaaggattttaccctcttcaggtgaaattgaatcttgtatgtaacacagatggtttgtgggtgtgtattttccctgtaagttgggtattatttgtttcatgaatgaaagttccctgaaaaggaagtaggaggaaagcaactttgttccagtgaacagtttgcaaactggggagacacagcttttgttgtaatgcaatgatgttctacagaataaagaaagggtttgggctttatagcaaaagttccctcccaggttttctatcaagtctatttatgcaaatgaaagattgaaactcgcttagttcttattggtcagcacagctgagctatgactgatcaatatagctgagccctgattggttgatacagctgagcccagattgacacaggcaggaaggctctgattgattggcctccaagccccaaaccagaattctctgtcagatatttctttcaaacagcagttggcggggagggattctcagccacagtctgttttatcaccaaacataggaactggtttggcttcattgtagaaagggaggtcctgtgatacgtccacaacatctttctgagaacagagtacctgaccactccctctcacagctattgctgcctgtttctgtatttactttgagcacctcagttggccatgcagagtctgttttgtctttcagctgggggcatactttaacggtttatgttttaatttctttttattttaaagatttcatcagttacagggtgcaaacattccagggatggcaattcagtatttctttcagctgatggttttttaaaagggccagtctgttcagttttttgctctcgttgtagtcttactggggaggggagcactagcaagagagctgggagcttcctctagcagccaacatagctttcctggtcttaacccatcagctttgcttgtgcctccaagaattcccttctgctttccaggtttctgctgctgaatcttaggagagaaatgctctgtgcatttctcaagcacagaaatgagatttgtccttaaacaaaaatgtcaatagttcctacgtagctgaaactgaaatgacaggggtaatgatcctttatctctacctctccgtcatgaaagagagagactcatcttctagtaaattagctcttccctccgtttattgtaagaaattatttatttagttgctaacccagtctcttcttataagacagtgctaaaggaaaaatggaactttaaaaacattacacagcacactattgtaggtcatgaaatagtctgaacctatttacatctagtttttttgcctttcagcagctaggtattaaaacttaggaaccccttgttgtatatagattactaaattttcatattataaccctttcctctttaatgtaaaatagcctaaaagaatcttccatcagaaaccacttcaacaaaacctaaggaattgggtggttcaatagataaatagtactgttccacagggagtgaggttcacgtccagcctcaagtctaaattaaatgagcttgatcgtatctcttcagtctcttgtgagcagcagtccagaatactgaactgtatgaataattccacagtttggcgtgattgatagtcttggctcaggagagtcccagaattgaactaacaaccacactaaattgtatcacatctttaaaggagatagccctgtttagtgagggctcagttacacgaaagggccatgggaagtagcatgcatcatccttagtctgggaagaggtagagaatggcttccagctctgctcctgggctcataattgaatcaggttttgcagctcaaatggcaccaaatgatttattttcttctcttgggctacctctagcttcgacgtttttgcatgtgatatggttttatatctactgataaatatgtgaatttttcttgctaaataatttgtctctagcagtgataagaaatatctgtatttcaaatatataaaaaaatctccatggctgtagtctgtgtacattctttggcgtacaaaaattcattgcatttatctacctattatttagctattttttaaatattttgtgtggtgaaacctgggaattcaggggagtgtgttgctttaatttaaagaaccacaagtgtcataactgcattaaaattttactctccttataacctatatttaatcaatcatattcattgacttttaggctctgtagtcacggtagttaaggaggagttcaaacagaaatatataaaaggtatagctttagcaatctgtattatttaatattttaaaatttttattaagctttaactgaacgacagctacttgcaatgttcaagcttattaattcagttatttaaatgacatagaaaacttcttttaatgtatgtagatcagtctctggaagaaaacttagaagataatactgtaaactaatgattattaaataaaatcaacctttttttctgaaaggcaacatgaacaaagcaatacattttatctagtaaaagtagaaaatgtaagattaattgcttccaaaaatgttagggttcacatgaccttgagattattctctgactgactatcaagctaacatatgagatagcagagatttttccttggaactgtctagaactgccatagtacttgactgacagagcttgctgtcctcccgctctctctccctaacccccccacactttctcccacccccatttctctctcttattgttccactagcaaatgttaagcatccatgataacacaagaaagaacagtggcatattctgttcttaaatgtaaattcactttttctctaactctgtagacttcagagtgtacatttaggctgtggtttggttttgcaaaaaagcagaaatgaaaaatactatatgaacttatcaatactgccttttaaaaatctattaactatcaagatggaatattaatgtagaataccaattttttatttttacaaaattctaatatataatgaaatacctataacctcaatattttccacatagtttttatttgctaattgagtagtaaataaaacaatgtaaaataattgttttgcctgtggataggcttatttaaaagtaatatcatctttacaaagtgtgcattcttattgtatgttagagtatcatctaccacttcagagactgatgaaatgtttcagtttgtatgtgttgctactaagcagctcaaagcaattgtctagtttaatgtatttccaattaatttttagttgcattagaaaacagaatgatgctttggttatttagctgtgaaaataatgaagcaggtgttttgaaatccctgaccttcatgttcaacatgaaaaacatgggtaatgtatataagtttgtctttagcttccctcacttagacttacagactagaaaaacagttacaaaatttcctgagttgcttttttttttttaatggcctaaaggttctcaatttagaattggttgctctaaatatttaaacattatttttttactgcacaaccctttagcctaaaatattattatcattgtatcagtatttctggtgtccagagctgcaattacacttcccactaattaatttggagtgatttttttctccaccttattagcattcattcattaaccgaataagttttgaggcttactgtgtactagacatgtgctggttgaagaaactgtactgatgaatgaaaacctcatgtcaagtagcttttggtgagtatagggaaacaaaaagagtaagcaaataaatgcagtgttatagcaagtgtatttttttgtctcttcactctgtacattggttcatatagtactttttagagatcagtgttgattattcctgtcagctggttttacctttttataaattaagtattagcctgatattagtagctgagaatactagcaaaatgagcttaggatggtaattaatccatcgtgacaaaccagttgcagaccaacagcatctgctactgctgggtaactagacgtatatcagatattatgtagacataaccattactccctgtttcatgttaacgtacctgggtttgaaattaaattattttgacattgtctgtagttgctcacacttacaagaagggaacctgcaggcaagtgagatgaagagagaaagaaaaggaagaagaaaaagcaaaaggggagagcgggctgaccaggtgaggtgggtagggttcataagcaggagagaggggaagcatttcaaattcccctaatggttttgaaatctatttttgttgttgttgttgttgtttgtttttgtttttgtttttttgagacggagtctctctctgttgcccaagctggagtgcagtggtgtggtcttggctcactgcaagctctgcctcccgggttcaagcaattctcctgcctcagcctcccgagtagctgggattacaggcacctgccaccacacccggctaattttttgtatttttagtagataccgggtttgcccatgttggccaggctggtcttgaactcctgacctcgttatccacccaccttggcctcccaaagtgctgggattacaggtgtgagccaccacgcccagcccaaaatctgttttaatgttccatttgtgttttcaggggagacatagaaatagcgtatgatttattgatgatactgatcctgcctcaacgttttgatattctctttgtttggcagaaaggaggctgaaggcccttctgatcctagtcagcagcagctggggtgttacagtcttggtgtccaagggcccaggtctggcactggaaatggatgtgtggggcccagcctgaatcacaccccaggtcctttccgtactgcttccatttcctttttggacttctttctccggggctggcaacagccttgtacgtgtacacatgcctggggggacagctgggctccattggcaggtgggagcagcctggcgacatggtggtggtgggagaggagcctctggacatggtgggaagcacaggagcctggaggcttttctcctgctgttttctctttgctccccagggcaagcacataccctgttgcttgcactgagtctactctccaaagcaaccatgactcgtgttaaggtggaagatcaagtgcaaggcggtgccagttaaatagtcgggaatatttactggtgcaaaactgaggatcaaagagaacaagagcattcggttttagagaaagtcagaaaccccagagaccagccacagacttgcatcctgatgcatcaagagccccaaaaggtggagattattttcttttgtcagcaggttttgctgttagtctacggtgacagtttccttttaagtagtttaagttgtcaaattacccttaatcagcttcaccacgatcagcagctttgccccgctttacctggatattaataaatgttggtcaggtcaatgttatgttatttgtttcccagggctgctgtgacacagtaccacaagaaagggaggctcaaaacagcagaaattggctgtctcaaagctctggaggccagaagtctcagatgagagtgttggcagggccgtgctccctctgaactctgcggggcagaatccctcctcgcctcttccagcttctggtggtctcagtcagtccttggcttggggcagcattgctcctgcagccgcatggccttctccctgtgtctcctcacacagccctcccctggatgtgtctctgtttccaacctcctctgtttggaaggacatcagtcatactaggttaggacctgtctaaagacctccagtcaacttgactacatctgcaaacaagctcacatcacgaggccctgggggttaagagttcaacttggctttttctggaggggagggacacagtgtaacctattatcagttttctggggtgttcaagttggagtatatttctttgtatcattcatgacgtttactgcatttttaatgtaggtagtgggtaaatctcacctgatctttttagaaacacaaatacttacctttttgtcagtaaagcgtttaaaaaaaaaaaaccaagcaaacataagaactagtgatttagaggtaggcagtagagtgagacagacttgagctccagcctcatgtctgagactcactagaaaatgaatttgggcttagcctccctggtctcagggtcctcacctggagaatggatgtgtggggcccagcttatgccttcaacactttcacagcttcaacacttttgaagtgcttatgctgtcaacactttcacaatgattttctgctcctcgataaagaaagcacgcttgatcctgtcctgaacacatttagcactcatggaaccaccacaggccctgctgacatgtttttttgttttggacaatctcataagaactttaggtctcacagcacggacccctcaaagtctgcctgggcacacaccacatgcagagttttggtgttttccacaccttcttgggataaaggtagtcaattctattacaaggggctcgggacagcctagttttgctagagctgtattgtaggaagcctaaggcagtatgtctaagaccattctgagtgcatgtagacaacgacgtccatggaagaggctgtgcgtttcctagggcaaaggaacattttgtttgttttatttttatttcactgtttacttttttttttgtctcacatgcatataaaaaaggatcatttggaatggttttccttttaaaattaagaagcccagaactcgaatttaatctgagttaggaaatctaacttgaattttaaaactccataaaggacatatatctagccccaaccccagtacctagagacacaaatagaaataagctggacttagactctcagccatttgctggagagacaggccaggtatgttactttgggtgcaaagcaaggctagatgaaatttagttggaatttctatcgatgatacttgaatttcatgtttaaaggtattaacattttttcactaatgatataaaacatgcttatgctttagtgagaagggaaagccattgaaatcctgagaataataagatgtttgactacatgcatcacctagccatccttcagaactttaagcaaaagaaaataaattactaaaaacaaagagccattaattagaccagtgtggcttatgaaacgtttggagctttggaggtagtgctttgcaaatctagctggcaaaaggtttggaaaactatgccagccttaagattaactctattttatgaaaaataatgaatttcaaatattcatattctatattaatatttaaatattcatttaaaaacccatttttaaaatagctcagataaggattttttacagcctatctcgtttgtatgacagactgttgcacacaatggctcatatacaattcttgaaactgagattcccaagcataccagacatatttttatgtctttagacttctaaatcaatcatatttggtagctcctcttaattacctgacctatggtggtcattttagttgtagcatctgttccatttatccatgtgtaaaagtatgctttgcttttaacattaatttattcacttgacaaatatttatcaagtatttataatatgttggacattgacttgacactaaggataaagcagcaatcaaaacacttaggatcctttgtttatggagcttagattcaggtatgtggaggcagacaataaaaatgggtacacatatgcgtgtgtgtgtgtgtgtgtgtatatatatacacatacacataaatatacatatacacacacatatatatagcatatagagcatatatagagtgtatatatagagcatatatagagcatatatatatatatatatatatatatatatatatagagagagagagagagagagagagagagagagagagagagagagagagagagagatgaaatctcactccatcacccaggctggaatgtagtggtgtgatcatggctccctgaatcctagaactcctgactcaagcaatcctgcctcagcctccggagtagctgagactacaggtgcacgacaccatgcctggctaacttttttttttttttgtagtggagatggggttctcattatgttgacaaggctagtcttgaattcctatcctcaagcaatcctcctgccttagcctaccaaagctctgggattacaggtgttagccaccgtgcctggccaacacatggatattatagcgggtgtattggaagacaataattgttaaaagatggatctgggaagggggataaggagtagggccggggatgggaacttgtataactagaggggtcagggtgagcttgctgagaaggcgacatttaagtgaagacctgaaagagatgaaggtccaccacacgcactctgtggaggagacctgccgtgcatggaggggtgggtctggtattttctgcaaagaacaaggaggtcagtgtccccagcatggagtcactgctggggcaatggccagcatggttatggggccagaagctttaggctatacagaccatggtaaggactttggcttttactctgagtgataaggcgaggcagtctagggtttcagcattggaataacatgatctgacttacatttttgaaggatcccttgggctcctgagttgagaagaaattggagaggagcaagtgtaggaaaaaggaggccatttgggacataagtgcattcatccaggagagagatggttctggcttggaccaaggtgcagatggtacagatggtggaatgtggttggatcctggacatatgaatgtgccagcagtatgacagaaaaaagaattctgtatatatgcactcagtcataacaaaggtctaatacccagaatctataaggaacttaaacaattgaatgagcataaaacaaataaccccattaaaaagcgggcaaaggacataaacagaaacttctcaaaagaagacatacaagcagccaacaaacatatgaaaaatgctcatcatcactaatcatcagagaaatgcaaatcaaaccacaatgaggtaccatctcacacctgtcagaatgtctgttattaaaaactcaaaaaacaacggatgctggtgaagctgtggagaaaaaagaaagcttataacactgttggtgggaatgtaaattagttcattcactgtggaaagcagtttggagatttctcaaagaacttaaaacagagctaccatttgacccaacaatcccattactgggtatataccgaaaggaaaatagattattataacaaaaagacacatgtactcatctgtttattgctgcactattgacaataccaaagacacacatcaacctaggtgcccatcaacaatggattggataaagaaaatgtggtacatatacaccacggaatactacacagccttaaaaagaatgaaactatttcctttgcagcaacatggatgcagctggaggccattatcctaagcaaattaacgcaggaacagaaaaccaaatactgcacattctcttttataagtgagagctaaacattgagcacatatggacgtaaacatggggacaactgatactgcagactactagaggagggaggaagggagaagcgtgcgggttaaaaaactacctattgggtactatgttcactacctggatgcaatatattcacgtagcaaatctgcacatgtaccccctatatctaaaataaaagtagaattaaaataaaagagagggcattggctaacataatttaaaaggatattgcttcagacccagctagatccagagacacaaacaatgtcagaacattcagcctgtttttcattattcagatgtattttctttggtgttggcttcattctcagctagtttaacagcaccatcaggaaaacattttctctttcccaatagttaagagccaaagttaagactgtaatgcgttaacctggtttaggtcatgtgcccatgccagaatcaaatattgtggccatgagaggtagaataactttttggccagatgaggattgcatacttaccttgctgtttgaatttttgctgtcactcatagccctgtgaacctattcatgacacagcacatagatgtactcaaacgaggcaagaaggaagtcactgcaaggtttgcatcagtagcccatgtgaaagctgctcataaccttactgacatattgtgtcatccctgttactttcacagtttcaggggtttccatgaaaatgctgactgttaagattgttaaggaagctgtctagaggaagaataagattcccccaaatcctgattgtctcacttgcaactgcaaagtatccagcctcactccaagggtgtcacagcatgacagcaggtgaagttgaccttgttattaaacacagtctggagtttctactatcatgtgtctatctataactccaaccttgtatttctatcagagctgcagatccatctcctcctgcatcatgacttttgtaatccagtggttgaccaggcacctggattacaaacgcaactaatctagtaccaaagtcttcatcctctcctttttcttcaccacctctgagtctaccacactccactccacatctgatcttctcatttcctcattttgaatggtggcaccaccttctgcccagtcacttaggactggaatcgatgagtcagtcctagtgtccaccttctcctccaccatcttcatttctacccgcttccctagagtcctgcctttagtctagtgtccttctaatcagatccataccccaagccaggatgatgcatctaagctgtgagcagaggcatgtattcccatatgtaaaatgctttagtgattcttccttcttggagcacctgaggctgtctgtgagctggcccctacctacctctctgtctttgctcacactctttctccttagtaaacggttagtgctccaattatatatttcttgtggttccttaatcaaccatcatttgcatcactgctaaacttttgttcctccttgaatttccttttttctctagtgtgtgtgatgaaaaccagcctgctcttctgtctaggctcaggtcaagtgccccctcttctctgaacccttttctggccctacctcatttaacctctgacacttatgggcctccaccttaccttgggaaactcttctctctgcctctgtaccaggttagggatttttgtccatctctatgcctaatgccctttaccaggctctaagccccactggaggcagagactatgtcttactcatgcttgtactccagtgactaacagttattagcatgtaatacatgtttctgaagtgaatgagtgcatttgtttttctgagaaagttgttgactccactgtttcctctgaaggtgtagttgatgtgattgggccatgttatgggctgaattaaatgcccccagattcacaccttgaagccccaaaccccaatgtgatagcatttggaagtggtgtgttttggggtaattaggtttagctgaggtcatgaaagtggggcccccatgatgggatttgtgttcttatgggaagaagaagagagacctgagctctcttaccaccaggtgaggacacagggagaaggcagctgtcatcaagccaggaagagagccctcatcaggaaccacatctgccagcatcttgatcttggactttgcagcctccagaactgtaagaaataaatgcctgttgtttaagccactagtctatggaattttgttccagcagcctgagctaagacaggtcacatgctacaaatgtgtgctgggaggttggaagacaatggatagtgactgaagaacaaggtagatagcagcttctctgaactgtattcctgacgatgaacgtgcctctgttcaggttgttatgaaagcaaattgacttggatcttgtgttcttcatctcataattaggggactttgattagaagacctctagggtcactttgagggaccacattctacatttatagatctatattagttctaatgatacttgttttgctataataagatgaagatgtctaggaaagtataggataaaaatcagaataactaaaaacttagttatgaaaaggaaggcaaggttttccataattaattgcttataaaaactaccaaagatgcttgtttgggcaggtgaaggcaggtagagtaatttaaagtataaaagatttcctttgtttaaggaatgtagttattaatgactaactctacataacaaaagatttttccaagatgtgattatattagacattaaaagctgttcacatttcaagtaggcaaatatcaaagtttgggatttctaatctcttgttatgtgatgtatttataaggtgctgataaaactctcatgggtcacaaatttattatatgaaattttcagttcaaaatcatgtgtatataatgacatagaataaaacagaagtacccagaattaacattttaatatatagtatgtctatttgtgtctatataaatatctataaatacaaataatgtgtatttatttacacattattgtgtaatacaatgtgtaaatttgtaattatacatttatttaaatataaaatgtatttaaacataaaaagtataaatttataattataaatttattgcacattttatatatacattttacatatacttttataaatttataattttatacatataaaattattttatatgtataaaataattgttactgacctcccaattcaccagtatcaggaggttgttcagtatcaacagaactctatccaggcctgcatattttcaccatttttattttgctattctatttcattgcaattgcaatatatcagttagatcatgggttgaagctacagaaacaatcacctttctagcactattttaacctagattgttattcccttgggcagaagactcttgcctaatacatctttgtcagcccataaagactagtgagatgtcttgccaggaggagctggaaatcagtaaatacttatttaatgaattggtttgaaaatgaataaacaaataaccataacagaagttgagtagggtactagtaatgctggaatacaacaccgtgaaagcagaagcagataatggattacagtggctgaaatcctgaatgtagagtcagccctgatttcacatttcagctctgccatttacaaactagataacttagggcaaattacttaatatcattaaaacttactcttcttgtctataaaacaagtgagcttctctgaaggtaaaatgagataatgctcagtaaaattttcatcacagagtaaactctgatgactttttgaactatttttatggaaagtaacaattacaaaaatagtaagttaatgaaatcataaaggccttcttttatcttcattattggcattttcactaaagatgtgattttaggaactgctttagtaagaaagagaagattcgaagtcctgaggggcagcattccagaagtaggatatggcctatgaaggctggaaggaagggcttggaatgatcaacagatgttctggacatctgagaatctccagacaagttaactgcacacagcaatctagaagagaactttaacctggacatgaatgcgttaggaggctccaagtgagctcttggaagaaggaagccatgatcaatgccttatgcaggaaagtaacctggccgccagcataaggaatgagcaaagagaaggcagtttttgaaggaaaatcctgagctaagattaggaagtgactcactaagtcactgacccccaggatcagaattatgggtttagaaagataaacaacaggaactggtatttagggagggtggcatcttttcaaggaggcttcctctgggaaattctccaagagctttgaacatctgaatgtaacgacatcactttgtactgtagttatgtatctgctgctgtctcctctagagagtgtgatgtaggacattggaactcgctgagctgttatctggaagcatgcccagtggggctgtggctgtgaagatggaagtgccttaaggactcacagctggagttgggtagggtgcgagtagacacatggacgaagggttgcatcagtgattatactttatccctgtggggagccaagaaggattgttaaagcaggagtataatatgaacataattgcatttacaagtacctcttggccagagtcttgaaggatagatagtagaagactgatggcagagacaccagaaaataagtcattaaagtctcgggtcagaggtaaggcctgcctgttgtcttagtccatttggttgctataaaaaatactgtaaactagatatttataagcaatagaaatttatttctcatagctcaggatctgggaagtccaacgttaaggcactgtcagattcagtgtctagcaaagactgctttctggttcaagatggtgccttctatctgtcttcacatagtagaaatggtgagggatctgttttgggcctcttttgtaaggggactaatcccattcatgaagggcttaatcctcatgacctaatgacctcccaaaggcactgcttcctaacaccatcacataggggttaagatttaaacatgtgaagtttgaaggaacacaatcattcagaccactgggccttggctaagaaattggtgaggggaagaagagtaaggaatggattatagtgatgctttagaagatggaattcatggaaactcacagccaatgacaggcctggattcagataaagatgtaaatttggtagaaaaaatcaaagtgagttttcacccactgacctcttcttctcattgtattttgaagtaggaagcaaaagcagctgatgagaataaggaggctaaagctggactagagggcttgagattgtgcagaaggtttgggatgggagacgaaatgcatccaagtcaactgagaggaatatcgtgcagctccgatacaccaatgtggatggtttcaggagtgaagcaagttgaaggatgagttgatgtaggtttggagatttgtttctctacaggaaaagacagggcctggctaagcaggtgtttagtatttgttgaacgaataaatgcttgcctggacactgttgagaaggaatttattagggatatggtgcaagaaaataaagatctagaaacaagtaactaatcttatttcctaagacatctttatcagagaagcctcatgtgacccagagtaggttcagcgccaccttgtatgccccatggcacttggtgccttccgttcattggattttgcttctctttcaattagaagtaggttattcatgaccatttgcgtgatgtcatcatccccaggggtctgttatttctgttttgttgacatggtatcctaagtgctgacacacagtagtcactccatcaatctacagtgctggatacaaagatgttaatggagggaatgacatgtatttttttttttttttttgaggcggagtctcactctgttgcccaggctggagtgcagtggtgtgatctcggctcactgcaagctccgcctcccgggttcatgccattctcctgcctcagtctcatgagcagctgggactacaggcgccctccaccatgcccggctaattttttgtatttttagtagagacgaggtttcaccgtgttagccaggatggtctcgatctcctgacctcgtgatccacccacctccccctcccaaagtgctgggattacaggcgtgagcccccgcacccggccccgacatgtatttttatatattttgttacttgatggtctcttgtaaggttttgtgaattgctttaattagtaagaaaactggtaagctaaatgacaaatggtactttattggaatatagtctctttctggctcataaggaagagaaatttgtgtaattacatcaaaattatatggatattacacagtgattagataaataaatataaaaccgtacagcttcagggcaacttacacctagcctctgtaataattacacttaaccttgacattatttatggtttccttttcccccttattacacgttttatcatactaagtgttttaaactgataatgctcaaaagtagcacatgatgtgtattattatagaaattaatgcttgccttaataacagatgctttctatttggggtttgaaatgaagaagcagatattttcctagaatacatctggaagtgattttattactaaaactgaaaaaaaaaacctttcaggtatcaaatgtgtctggtctgtgatacgtcagatttctgaattcttacacttttatttcctatagaaatctgaaagtgtgttattaaaagttaaactgttctgtagattgtctacctaatttcataaggtttagtgtaatagatatgaaatctatgtcacatctactgtgtggtcttcatatcttagttatatttagaattttgatcaatagattttggtagaacattattgaactttctcttttttttttttttgaagatggagtctcactcagtggcccaggctggagtgcagtgttgcgatctcggctcactgcaagctccgcctcccggtttcacgccattctcctgcctcagcctcccaagtagctgggactacaggcgcctgccaccacgcccggctaatttttttgtattttttgtagagacggggtttcaccatgttagccgggatggtctcaatctcctgacctcatgatccgcccatcttggcctcccaacgtgctaggattgaactttctcttttttaatgatattattttacatcataaaatgtgattttacttaacagcacaaatatgttcttcaaaaatgagtctatcaaacaaaacgttcataaattaaaatcagaatgaaatataaatgcaaattttgaaagctaaatcattgtttatattttaaaatattctatatttcctcaccttaaaaattggatgctattcacaaatattcctaaagaatatttttgttcagctaacatcaaactgtggattacttacatagtgagttacacactacctatcttttcctctgccaagctgtattccagactgccataattaattaagtaggtgaatgaatctctgatgggttgtatgtctgtttctatactcctcagagagtttctctcttccactgtgttagaacaccaaataaattgggtctctatcactactccaggttattatgaaagtaaacatctggttttaccttcagaaaatagcattggttgttcaaaattcaagatatgcgtgtgtacattagcctaaaatttattttttgaaattataatgggattgttatataactccttctgcaagaatattgtcaaacaaaaaaatctgtatctgtctttctcactgaaatattgtgagagttaatgagacatttgtggctagatcgtgcaatcctttcaggaatctcaaagcaagaacaaaacagcatttccttttgaaaggcatatgttttactgtcaaaccaaacttaaagcagtaggaatgatacacatttctgagttaacttcctgctttcttggacgtgtcaaaattactgatgttccagcgtgacagaagcctagtaatgaaggaaccatgtaggtggaaaaaaattattacccgacttgcaatcaaataatagaacataggtatataatattcaaagaaaagaaagtgagagtctgaagtcatgcataaagcaaaatcttcacagtaaattgataggctgggcgcggtgggtcacgcctgtaatcccagcactttgggaggctgaggtgggtggatcacaaggtcaggagtacgagatcagcctggccaacatggcgaaaccccgtctgtactaaaaatacaaaaattagctgggcgtggtggcgggcgcctgtaatcccagctactcaggaggctgaggcaggagaatcgcttgaacccaggaagcgaaggttgcagtgagccgagatcgcaccactgccctccagcctggggaacagagcgagactctatcacaaaaaaaaaaaaaaaaaaaagtaacagactggagtcttacctatgtcttactttttccctaattttaagttagacactaatagaggtccggtaactaattgtattcacttatgtagtacttggtatagattttcatcttaggaatgtcagaataatggtacttactgctgactgctgtatattactgctcaggttcaagacagaaaaccgagagttacttctatttcctccatttcacctcatcctcccgtttcaagggattggtgagaacctttgatgttatcatctccaaacatacatcaaattcctgccctctctctctcctgtccactgctaccccatcatctcttctgtccattgctaccccatcatctcttgcctgaaatactacaaccaacccccttgtcgctccactgtctctcttgccacccatctccccccactattccatagccacaagaagcaaaagtgaccttcaaatgtcactcagattgtatcactccactgcaaggacttaccattgcacttattttaaaaccctaatctctcttcctggcccctgtctgccccttgctcccaagttctgtccattttgatattctttcctttccttaaaaccctgactgtttcctcctggagggcctcggcatggtgtggtttgctctttcccgtgacttaggtctcagcttaaatgtcactatcttcaagacgttctacttgactccttttgtaaagttggctgagaccatttccctccctgctttatcctctcagttgtaatttattatgatgagtgttattcatgtagcagaaagtatctcctttcatgcatttgccgccaattgccactgtttatctgcatgtttgttgcatgtgagctctctgagcacaggaagctggcttacacacagcaccttggagtaaatgaatgaatggtcgaatgaaaagtgctgataggccgggtgcagtagaggttcatgcctagcacatttctataaaatcagttggacgtgaagtttgacagtggctttttcactctgtctgctgccatgacatgcaaatagtgccttctcatgtgagttgcattgttggtgaaatgggcctcggtttcttcacctgaagcaaaagaaatgagagcagataatcaccaaaattccagctctaaaatcccccaggctgtgcagatgccacctatccccagaaatggcttgaaatgccacgtggagctaaggagtctcttcctgaaggaaagaatgagcacagtctgaggagggtgtctggggagcgcatcgatttcggagctgctgtgggaatatacttaggttctactggagagctcatcttgcagaagctgactgcattgaacgtgccggggaccacctggtccccctcttctcgtttggcaagaatcccggctatcgatgaagaaaccagctgctttcctatgtagtgaacaagcacaataatgtttatacagtttcccagcctctcttcccccacccactttcacccttcctcacccaagaataatcgtgccaaatagatatcagattaagaaaatgcttctcattagttgtctgctcaaaacaactttggaagcaatcctagaacatcccgttgtatcttcacagccctttatctcttgaaagttgttgagagagctaaattaaagttgcctaccattaatccttgctctcaacactgtaaatcaaaggaatgaaatacttctcatcacaattcagatcccaaacaggtaaaaattacaacataaagcaaaatctaatactggcattgcccctgtcacctgagccacgtatcctgactgaagtaatcagcaaggggcaggcttgtactgcaactcaacaattgtttcagtggccatgggttgtgtaaatacattccatttttaacgtccccatactaaaaacgagatgtggtcatcttcacttggttcttaaaacggataggttagatccagtctccacagctgttttgcaatttcacgttatagtgacagcttccataatacaaattcagattgtaaagactgacctctcttcactgtcacagagcattctgggtgaaggctttttatctgcaagttgcacttgacaagcgttttagagagggaaggtagcaaaataaagaatcagacaacgagtcaaaggagctaagctctgttccgagaggccctgatattgatttgtggagccttgtgtcattttctctatctgggctccagttcttccatttacaaaatatggatcatggaccatattgtcaacctgtgtaatccacgaagtcagtttttatagatatagagccagcactgatcaaatgtgtcagcctcttacaaccacagcggcattatgaagatctgtaagtgagcacttacggagcttcctaaacaccttgggaggaaaccagtcagtgtctgaacacaaagaatttatctacaacataaaacaaaaaccactgcagagtcagagatcccagtgccctcatcatcgcctcttctaggattacacagtcacggaacgtgtgcatccgcctccagaatcgctccccaaattccatggggtaaatattttactagaaaatgtgagtcaaaaggaaagcaacctgtctctaaagtaaatcttatggaataaggtttttaatattgtgaaaaacacaaactaaccattctttcctaacaaatacccctagggatgggggaagcacaaggatctctgcgatcaagccctgccgggccgcagctttcattaggttgcagaggcagctcttcctttccctgagtgttcctgcatccttgaggcccctataaagaggactcagcgtctgtttggcaccgcctgttctcctccttccttgtgtctcttcgtccactctgtcaccacggcgctcgcagttttctcaggagacacctggatctcaggctctaaggcctgtctcactctgtgacgcatgtggtcatgagcactctgacctccgcatgaggatggtcagatggcagagggcagaacactgggtcagagatctgaaacccagcatgcagccctacctctgcctgtcacaggttttaagactttggcgagtctcaaatcttcaagacctggcttcccttatctataagacaaagagatcggcttgagtgatgtttgagatgttttccaccctgcagtgattcattataaaataatagacatcctctgactcctatggaccagtcaaggattgaagcttcttaaggccagttattcctctgccatctgactcgcacatgtagcagtctctaaagattgcctacttcagtcatctgattgcgtctgtttcacagattcttctggaatttttcttctttcagttggcttttttttatcgtggtcaaaacccccatagtcgactatgatctaaataagcagtgccctctctattaagaacagtgttgaattacctattcttgcaaccacattgaccgagcttcatctctgttataaatcataacctgaacagacaatctcagtgcatcccggcacctgcagattggatatatcagtagaagttccctcatcccccagttccacatgcacagcactcattgaagtgaaagcatgagtctcccatattgaaagacgagaagatcccataacacatctgtgaatctggacatctcaagctgcctttcaatggattttagactgtgatcatacggagggctgaagaattgtctgctctacgtcttccacagtgtactggtcttgtatgtctaacaccctataagagtaaacaatgtgctctgatagatgagaattctaaaaaaatgatatcttctataatgattctttagatttaaatgttcattatggcatttaggaatccctgttataaagcaggttttaaaaatgttttatccaccatgtcatacttttgaagaagctatgatctcaggaataagagataggttacaagagttctctatcatggagaaacttacttttaaaactgtaacatcagtaaagaaaaaaatgtagaacatggacaactaagctttgttcctagtacggtaaagtgatgctgatgttggtgattgctatggattttgagtgggacttagttgaaacacagcataagtccaacatcagtcctcaacttggccccagcactgaccagtcatgaggcagcagaggagtcactgcccctctctggcctcagtcccttgtctgtaaaattagtaaaaggcggtttgccctaaccagttcacactgctgacttgaaagccagacgatgtgaaagtctgttgcaagtgtaatgcgatctttccatctaatgcgaggcctggctccatttcatgcatgatcaccttcagctgtgactgcagcccttgctggtaggacctctctcagggactcccactcacccctaacctttagcactgaatgtcaggttggtgactcccactcttgctctgtagcaagcaaggcaattcttttacttaaatgtcattttgtctttaaagttctaagtcttcttttttgagattcccttctaccagttttttctccccaaattagatattccacaattttcaaccttttttgagcttattcagcatatttatgttgtactaagtcattgtttcaataaagaagaactaaaaaagtgctagaaataaattgtcctgctttgcataaaaccttaagagtagtgtgtgtgtatgtgtgtgtgtgtgtatgcgtgcgcacgctattacagagatagatcttttgcagaataataaaaataactatgggggtcctattatttagacagaaggggttaaatgaaccctacaagcttcttactgtcaggagagaatagatttcagaaaaaataaagacaaggaaacaagccccaaagctataaatttacccacagtgtttaaacactcctttgtgattattttctaaattttctcaggtaccctttttcatttgaaatgttagtggaaagttctggagaagaatttattgcaagtaacgtaataattataaaatagaagaaaagggccctgctgacttgccagagcttgaagcaaaagagaaagttgcctgcattgacggggctcgctcaagtatttcagtttcaacacagctgtcctttctcattgcagatggagggcggctgccaccatatgccacctctgtaataaacaaaagtagtgcaacaatataattaatagcaagccattttcatttttaaaattccaaaaaggaatatgcttttcacgaaaattcaagatgtaatgcccaagtaaattgggcaaaatacagcaatgtatcaatgagattccactttaagaaagccaatatacaaaatattgtacttgaaagttaacattactgtcatcacaaattacttgcttatatttctttatagtactttaagaattgtagtctcacctacttcattcaaaatgactcatcctgtaaccagtcttttcctgggatctgttgtatctccattatataccactgaaaatatttactaaataggttccccaaataaaaatatgatttgttacatagaattttctgcctttttcctgtttcctattgacatgcattgtttccttaaataatgatgatgatattaataattgctaacacatatcatgcttagtgtattgttaagagctttatatttaatcatgaataatcttatccgggagatattattatctccacgttacagatgataaaactgaatcatagaaagattcgtcacttgcctttcttataactcgttagtgatgagtggggcttgaacctggcaatccttctccaaatccgtggtctgagtcactgtcctgtgaattagggctcagtagcaatggctcttttgccacggcttgctatgattgactcttacagcagtgagctctctctacagtactcaagatctgactgtggtactccatctgacttttctgacttttgctgagaactttatggaaaatatgtgaatgtggaggaatttcaagagaatccctgcaataatctgagcttgttttgttgtgttctctctgccttcttgtctggacaatgcctaccaaggtatccagacaggaagtccatgttggctgagaggctgaaaatacataagccaatagatggtaactcaagctgtgcaagggacccagccaccgtcatgtaaattgctaccatgatctaagcttaattatcatagacagtactaattaaaagacaatattgtaaatataaactggccctgatatatggcaaatgattagtatgtattacaacttgctaaatcaaaaacatgtcttaaaatacaagatagtattgcaataagtactagagaatgcgacaagaaaattaatcatctgctctttaccacaaattccttgtacaggatatctgctctttgtgttttgtttcacactttaatgcaataaagtgtttacaaagcataaagcactctgttcatttgtcatgttttactttagcttttccatttttttctctctacaacacttttcactgaagataagtttgctgacatatggcataatcattttttctcttagttacccaattctgcttcacaactttaatttttatatctattcgaaattagttttaattacctcaacactttaaattgatttagctctggttttagaaaaaaattcaaataaaatctttagcaggtccttcttctctccctcccttcttctctcccttttctccctttttccttcttgccttccttcctcccttcctccctctctccctccctcccttccttccacaaatactgctcaagtcctaccataccgagtactgcactgtaaatacaaagatgaaaagttacaaacctgccccctcggaatttgcacatccagtgaggcgattgacagaatgtgctggaaagggctgggtgtgagacgggatttgagacaagagcagaaattcatggaggtgggcagggcagggaaggcttagcaaaaacaaacaaacacgaagatgaacagaataaagtgtatgtttgagaaatcctgaaacccggaggccgtgagtagtgagaaatggaagcaagagacaccagacaaggcgagaagggatgtttggctccagaataacagaggcactgagtagcgtgttttaaaacttaaattgtaagtttgagatttaaatagagaaggaaaacgattttgagttttgacaaaataactttggaaaccattcaaagagtggactgcagctgaatgatgctggcaggtgtggaacagtctagccattatgagggccgaacgaagtgaccctatcatggatggaaaggtgggagggagatagaaatctttaactaacaggactggataaaggactggagttgaggggggaagaaaggtagttgctgataccctccaggttcttataatgaatgagttggaggcagtgctgtcaagagacacaggaggaacagcaggctgtacagaaagataataagataactctggtgtatagatgtagagatggaacagcagtgtggtatccagattaagtattcaagtcatagccactgaaatttggaacgaggtacatatgcctggtttcatttttatcgtttaacttcttttagagaatctaactaatgtaataaatatctataaaacaatattttcttatagaaatatactatcacacacacaatggatgacaaatattgaaaagaagaaaaattattttgttatataattatgtcacacaacaacaaaatcaagatattctaaattctaaatactattattagaagtatcaaataaaaatgaaagtagggtgcatgaatataaaaaaatacgcaaaatgaaagtggttttctttatagtattgataaccaattggaaatgaaaacagggtaaaataccacaaaaataacaacactgtacaagtcctaagaaaaatatagcgagaaacttgcaggacttgagtaaatgagaaatatttgttaagtaagaacaaatataatggtattgcaggttaataaattgtttattatataaatatttaaaattttgtacagctaaaaatactttaaatatagatatgagttgaaggatagactcaaagaaaatatttgtaaacatttgataaataatatcactaacatacaaatagctcctttataatgacaataaaaagatccatagcgtaaatacaaatggaaaagtcttaacaggtaatagataaatgaatataaattgtcatgtaaaagtccttcttctgaactaaaagttaagaaagtgaaaattaaacatataaacaagataccattttcttttattaaaatttcaaattaaaaaaaaaaaccagcaataagtcctagcaacggctgtattgatatttacctggtaagctaagtatcaccaataaaatactaatgttccacttcataaatattcgccaccctgagccccttttttttctcctcgaaccccatcccacccttctccgactgaccaaacccttccaacttcaagagcaataattagaggattaatttgtggcacttgaatgttcctgcctagcttattattaaatatttagaatagtatttctgggtatgagtacagcacaatggggatactcagttatactgcagttgggaatatgaagtgttaaaactttttaaaagagttacattactatgtttattaaaactcagtatctgcttatttttaaacaccccaaaactaccttattttttaatcttataaaaataaaagcactgacatatgtataaagatgtttatggccaggcacagtggctcacgtctgtaatcccagcactttgggaggccgagggaggcagatcatctaaggtcaggagttcaagaccagcctggccaacatggggaaaccccatctctactaaaaatacaaaaattagccaggcatgttggcaggcgcctgtaatcccagctacttgggaggctgaggcaggagaatcacttgaacccgggagccggaggttgcagtgaaccaagattgcaccactgtactccagcctgggtgacagagtgagactccatctcaaaaaaaaaaaaaatgtttataacagcataaatagcccccaaactataaacagcatgaatgctcattacttagaatatggctgaagaaattatagtatatttctataagaaaatattgtgttttatagatatttaaaagaacagattaaatttgtgtttactgacttagaaagatgcccataatgcactgtttacaagaaaaaacacaatgtgtagggtaacatgtacttttgtttagaataccagttttattttagaaaaagaaatacatctctctctggctctatctctgtctctctatctctgtctgcctgtctgtctgtctctctcacacacacatacacacacacacacattgtagacataattctatatggtgtgaggattaaaatgtatgaacaaatacactcccagttgttggggatgggtgaaggggatatgcacaggatattaactttttcttcatataactctgtattgttagacttattttattcagcattttattcttgcccttctaaaaaaaactgtagaaactccagacaaagagaagtctagaaatgacattctccagagttgaaggaaaatagtgattataatagagcatgacaaattaaacacagactatattatttaataagaaaagaaaaataataaaaatttaaacccaccaaataatgaaatgctttgttgaactaagcaatttcctctagaacattgatttttaacatttttaagggtgactcatccttagaagaattggatgaaacacttttcccggataaaggtagctgagttctcaaatccataaattgcatagaattgtataggtttgctgaatccctgttctccagtctcctagttaattatttaattaaaagcaattgtaaataagtgcaaaacatatattcgttatataggtcctcttctcattgttttgataataacctgtctttataatgacctgctttcttaggacgaatatgtttatttcagaattaaagctttaaagctaattcaaccccactttgccagtccaagatgcctttactcttctgttaagcttgccactcccttcctcctggggtgaggtgacatctcactgtggttttgacttgcatttccctgattattagacatgttgaggattttgtcatctacctgatggccatttgtatgtcttcttctctgaagaagtctatttggatcttttgcccatttctttattggattatttttcttgcactgcgttgagttcatttatattctggatattaactccttgtcagatgcatcatttgtacatattttctctcattctgtaggttgtctcttcactttgttgagtgtcttcttggctgtgcagaagaagcttttcagttcaatgtaatctcatttgtctactttcgcttttgttgtgtgtatcttggagatcttatccaaaaaatccttgtccagactatgttgtgaagcccccttttgagtggtgctaataaattacaattatgtttaaattatttgataaaattgtatctcttacacacttgaaatgttggtataattttataatttatctgatttttttagctttactttgagctaaaatcaccttttgacttattttcctgtcagaataaataatatatgcagcaaagaatactaaagatagactaatgaaagtttaatgtgctttctatttaatagtaattcggaagtttacttaaataaaataaattcacaggtattaaaaattctccctcagagcttttagggcctaaagttggtaaataatattcagtccagaaaaaaaatgaaacttagaaattaacagaaatgaatactaaactgcaaaaatttatatttagaaagaagaaaggcctgcgagttttagaaagatatgtagtttaatggtggaatttaataaatggtcgatatgttagcttctttgttcagctaattcatactctttagaaggttcaaggttttcccagtactagttctcatcacaattatgtgaaacacacacatacacacacacacacacacgcacacacacacattttcagtgtaataattactagcataagtttttaattacactgcatacagatctcatgtcattaggcccaggtcataaatgtatgcctaatactcttcagtcagttcaccattgttttacctagtctcttaaaaataaatgtgaaaatgtttattcctctggcttttcagtaggggcagttgagatctcatgtctttcttgccatatattaagaaaaaatgttaattaggtgctaccatgatgtttttctaccaggattaagtaaggttcagaagcagataaatatggcagaattggagaattacaataatactcttgtttttggcatttgttggcttttttgcttagaatttccaagtatgtttttacattaatattctccatttaagaaacatcctatggagtagcaacagggaaatactgttttatctactcaacctacagagacaaagctaaatgcagaaggataatttgctcatttaggatctgatgttctcgaccttccatcacttatgtggaagatatttcatatttgcctgatataaatattggcaatgtatggccccgcctttaagaatctcattaaatttatctgtaataaactatactacaggaaactatggtaattactacaatacaagttaagtgtcatcgtaacaggaagcaggaatgggagccattactttctttttttttatttcaataatttttggggaacaggtggtgtttggttgcatggaaaagttctttagaggtgatttctgagatttgggtgcacccatcacccgagcagtgtctactgtacccaatgtgtagtcctttatccctcaccccctcccaaacctcccactgagtccccagtgtccattatatcattctcatgcctttgtgtcctcatagcttgactcccacttatgagtgataacatacgatgtttggttttccattcctgaattacttcacttggaataatactctccaattctatccaggttgctgcaaatgccgttatttcattccttttgatggctgagtagtattccatggtgtatatctataatatatttatatatttttatgtataaaacatatatatatatatatttacaatggcaaaaatatagaaccagcctaaattcccatcaaccaatgattggataaagaaaatgtgatatatatatgtatatatacacacacacgcacacacatatacatgctgttttcatgactatggccttataatatagtttgaagtcaggtaacgtgatgcctccagatttgtgctttttgcttagtcttgcttgctttggctatgtgggctcttttttggttccatatgaattttaggattttttttctagttctgtaaagaaagatggtggtattttgatgggaatttcattgaatttgtaagttgcttttggcagtatggtcattttcacaatattgattctatccatccatgaacatgggatgtgtttccatttgtttgtgtcatctatgatttctttcagcagtgttttgtagttttcttttagaagtctttcatgtccttgattagatatattcctaagtattttattttatttattttggagctgttgtgaaaggggttgagttcttaagctgattctcagcttggtccagtaagattggtaccaattcttttttgaatgtcagctgtgaatccatctggtcctggattttttttttttttttttggttgacaaattttttctgttagtgtttcaatattgttactattgttacttgttattggtctgttcacggtttctatttcttcttgatttaatctaggagggttgtatatttccaggaatttatctatctcctccagattttctaatttgtgtgcataaaggtgtctacagtagctttaaacaatcttttgtatttctctggtatcggttacaatatctcccattttgtttccaattgagcttatctggatcttctgtcttcttttcttcttggttaaccttgtgaattgtctatcagttttgttcatctttacaaagaaccagctttttgtttcatttatcttttatattgttttctttttgtttcaatttcatgtagttctgctgtgatctttgtcatttcttttcttctgctgggtttgggtttggtttttgtgtttgtttctctagttccttgaggtgtgatgttaaattgtctatttgtgctcttttagactttgcgacgtaggcatttcatgctatgaattttcctcttggcaacacttttgctgtatctcagtggttttcataagttgtgtcactattatcattcagttcaaagaatttttaaattttaatcttgatttcattgttgacccaaagatcattcaggagcagattatttaatttccatgtatttgtatggttttgagggttccttttggagttaatttccagttttattccactgtggcctgagagagtacttgatataaattttgattttcttaaatgtattgagacttgttttgtggcctatcatatggtctatcttggagaatgttccatgtgctgatgaatagaatgtatattctgcagttgttgggtagaatgttctataaatatctgttaagtccatttgttataagatatagtttaagtccattgtttctttgttgactgtctgtcttggtgacatgtctagtgcattcagtggagtattgaagtctcctactattatggtgttgccatatatctcatttcttaagtctagtaataattgtttagaaatttgggagttccagtgttaggtgtatatatattttggattgtgatattttcctgttgaacggatccttttatcattatatgatgtccctctttctcttttttaactgttgttgccttaaagtctgtcttgtctgacctaagaatagctcctcctgcttgcttttggtttacatttgcatggaatatcattttgcactcctttctctaggagtttatgtgagtgcttatgcattaggtgagtctcttgaagacagcagatacttggttagtggatttttatccattctgccattctgtatcttttaagtggagcatttaggccatttacattcactgttaatattgagatgtgaggtactgttttattcatcatgctaattgttgcctaaataccttatttttttttccattgtgttagtgttttataggccctgtgagatttatgcttcaggaggttctattttggggtatttcaaggttttgtttcaagatttagaactccttttaccatttcttataatgctggattggtagtggtgaattctctcagcatttgtttgtctgaaaaagactttatctctctttcatttaggaatcagttttgctggatacgatattcttggctgataattattttgtttgaggaggctaaagataggaccccaatcccttctggcttgtagggtttctgctaagaagtctgttgttagtctgatagtttttcccttagaggttacctatgctttcgcttcacagctcttaagattatttcctttgtcttgactttaggtaacctgatgactgtgtacctaggtgacaacttttttgtgacaaatttttcagctgttctttgaacttcttgtaattggatgtctagaactgaagtgaggccaaggaaggttttcttaattgttccctcaaatacgttttccaagcttttaaatttctcttcatcctcaggaataccaattattcttaggtttacctgtttaacataatcccaaatttattggaggttttgttcatttttaaaattcttttttctttaaaaattttttttatttcaataggtttttgggaaacgggtggtgtttggttacatgaataatttctttagtggtgacttatgagattttggtgcacccatcacctgagcagtgtacacagtgtccaatgtgtagtcttttattcttcaccacccccaccatttcccctgagtttccaaagtccaattatcattcttatgcctttgcatcctcatagcttacctcccacatttgaatgagaacatactatgcttggtcttccattcctgaattacttctcctagaataatagtctccaattccatccaggttgcagtgaatgccattatttcattcctgtttatggccaagtagtatttcatggtatatgcataccacattttctttatcaaccccttgatttaatgggcatatgggctggttccatatttttacaattgcaaattgtgctgctgtcaacatgcatgtgcaagtatcttttttgtataacttcttttcctttggatagatacctagtagtgggatttctggatcaaatggcagatctacttttagttctttgaggaatctccacactgtttttcatagtggttgtactagtttacattcccatcaacagtgtaatgtgttcccttttcaccacatccatgccaacatctagtatttttttattatggccattcttgcaggagtgaggtggtattgtattgtggttttgatttgcatttccacaatattagtgattttgagcaatttttcatatgcttggttttccatttgtatatcttcttttgagaattgtctattcatgtccttagcccactttttgatgcgattggttttttttttttcttgctgatttgtttgagttgtggattctggatattcatcctttgttggatgtatagattgtgaagatttcttcccactctgtgggttgtctgttaactgtgctgattacttgttttgctgtgcagaagcttaaggaaggaatagaatctctgaacaggccaataacaagcagtgagattgaaatggtcatttaaaaactgtcaccaaaaaaagttcacaaacagatggatttacagctgaattctatccgacatacaaagaagaattggtaccaatcatattgacactattccaaaagatagagaagagggaatcctcctttcagtcattctatgaagccagtaccaccctaataccaaaaccagggaaggacatttaaaaaaacgaaaactacagaccaatatccctgatgaacatagacacgaaaatcctcaacaaactactagtgaaatgaatccaacagcatatgaaaaagataatccaccatgatcaagtgggttccatatgagggatgcagggatggtttaacgtacataagtcagtaactgtgataaaccacataaacggaattaaaaacaaaaatcacatgatcatctcaatagatgcagaaaaagctttttgacaaaatccagcatccctctatgattaaaaccctcaccaaaatcagtatagaacagacatatcttaacataataaaagccatgtatgacaatcccacagccaacattatactgaatggggaaaatttgaaagcttcctcctgagaactggaacaagacaaggatgtccactttcaccactgctattcaacatagtgctggtattcctagccagagcaatcagacaagaaaaagaaatcaagggcattcaaaatggtaaagaggaagtcaaactgttgctgtttcctgataatatgattgtatacctagaaaaccctaaagactcatccataaagctcctagaactggtaaatgaattcagcaaagcttcaggatgcaaaattaatgtacacaagtcagtagctctgctatacaccaacagtgacaaatctgagaatcaaatcaagaactcaacccctttcacaatagctgcaaaaataaaataaaataaaatacttaggaatgtacctaaccaaggatataaaaaacctctacaaggaaaactacaaaacactgctgaaagaaatcatagttgacacaagcaaatggaaacacatcccatgctcatggatgggtagaatcaatgttgtgaaaatgaccatactgccaaaagtaatttacaaattcaatgcaattttcatcaaaataccaccatcattctttacagaactagaaaaaaatcccaaaattcatatagaaccaaaaaagatcccacatagccaaagcaggactaagcaaaaagaacaaatctgaaggcctcacattacttaacctcaaactatactataaggccatagtcaccaaaacagcattgtactggtataaaaaaggtacatagactgatggaacagaatagagaacccagaaataaagccaaatacttacagcctactgatcttagacaaagcaaacaaaaacataaagtggggaaaggacaccctgttcaacaaatggtgctgggaatattggcaagccacatgtagaaaaatgaagctggattcccatctctcaccttatacaaaaatcaactcaagatagatcaaagacttaaatctaagacctaaaaccataaaaattctagaagataatattggagaaacccttctagatattgggttaagcaaagacttcatgaccaagaaccttgaagcaaatgcaacaaaaatatgataattagataggactttattttttgtctttgtttttgtctgattggattaattcgaaagccttgtcttttaactctgaagttgttttttctgcttgttgtagtctattgtcgacaatttccagtgcatttcatatttctttaagtgtgtcttttatttccagaagttgtgattgttttttctttatgatatctgtttccctggataatttttcattcttatcctgtattttttttcaattttttaaagttggctttcaactttctctggtatctctttgagtagcttaataataaaccttctgaattttttatttggcaatccagatatttcttcttggtttgcattaattgctgaagagttagtctggccttttggtggtgttatagagcctgttttgtcatattaccagaatgtcttttctgatttcttcttctttgggtagactacttcagtggaaaaatctggaactcaagtctgctcttcagattcttttgtcccatgagttgatcccttgatgtgttgtgttcccacttcccctaaggttgaggctttctgagagccagattgcattgattgttattgctcttctgggtctagccactctgtggagctaccaggctccaggctggtgctgggaaatgtctgcaagcttcaggtctcccagccatggataccagcatgatatggtttggctatgtccccacccaaatctcatcttgaattgtagctcccataatctccacatgtcatgggagggaggtaattgaatcacgggggtgggtttttcccatgctgttctcatgacagtgaataagtcccacgagatctgatggttttctaaagggcaatttccctacatacactctcttgcctgctgccatgtaagacaagcctttgctcctccttcaccttccgccatgattatgaagcttcctcagccaggcggaactatgagtccattaaacctctttttctttataaattacccagtcttaggtgtgtctttattagcaacatgagaacagactaatacacaacacctgctctggtggaggtggcaggggattgaagtagatagactctgtgagagtccttgtttgtagatatgtttattgtgctgactttctcaaatgctgattatgctagcagtgaagttgtcccatggacagacccaggacctctggttatccaggatgctgcaggcagtggaattagctgttgttttctccttccttggagcagggttattatgtcatgagttgctgtaatgtcctgagttggttggcctccacccaggtggtggcacattcaagagaacaccagttttgcacccgtctcatggaatttgcagtggcatgccatttctttcaagggatctgtgaattcttttggttttcctggtacattcttgaggtggttcttggagcaaaagtccatggtatgagtctccacatgcttttctctccatccaagtgggagctgcatgttagccctgtcttctatctgccatcttcctctctgagtccaggagcaattacttttaaattgaggaagaatgttgtgaatttcactagggacacagagtgggattggagcagagatttaactgaataaagaggagaagggtcaatcgaggtagagagagcaatagatgcaggttcagcataggtgaaagctgggacgcttgagttgaggagacagtagcaatgaagccggacagatggatatgcatggggcaagccttagaagagcaagttgaggagttcagatttcatttattgggtatgaaaacagccacatagctgttttggaaagggaagttgttttggataggatcagctatgttctacagaaagctattatgtagccattctatgtagaatcgttggaaattggtaaattttaaaatgttcatagactttaatgaggtaatcctgtttctgagagtttatgctaaggaaacaactgaatctattgaaacagttttatgtgcagcatattcattaaaatgccaaacaagaaagggaatggttatataaactatggtgcaatctcttaatggaaaattaagaaaacactatgaatttaaaagtttacaaagagttcttaataatatgagaacaataacaggttatagtaaaagaaaaagcaaaactgaaaactatgagtatggtttgattacagtagttttacaaaattttgtgggggcaaataggcaggagctactgactggtgaaactattggttttctttctacattacaatgttcaatacatttctctaagcatgtattagttatgcgacgaaaaaattcaatatactttttaaatagcccaatcaagaatagacacgtccagtgctactactctggcaagacatgaaccaagcaatggcagtgagaatgtagagaagggggcagattaagatttcaggtggaacattgttctcatagacataagcataagaaagacctaaggcaaaaaggacactacagctctgacttctacagctggttagatactgatgctctaggtcacaacagcaactgcaggaggagaaacagggtcagaagaggaaacttcctaagtttgatattgaatgtgtttatttggaaggatcctgaggatacctgacagatgtatcataatggcagatggagataaaagtacggtcatgcctcagtagtggtggaaggtttgttccaggacccctttcagatgccaaaaaccatggatgctcaagtacctgacatgaaatgacatagtatttgcatataacctacacacatcctcctgtatactttaaaccatcttgagattacttataatacctaatacaatgtaaatgctatgcaaatatttgttacattgtgttgtttaggaaatcataaccaaaaaaatgtctgttcatattcagtacagacacaacaaatccatttttatgaatattttcaatccttggattgaatccacagattgaaaacccgcagatatggagggctgactgtgttcagtacttcctttttttttttttcttttctttttttttattatactttaagttttagggtacatgtgcacattgtgcaggttagttacatatgtatacatgtgccatgctggtgcgctgcacccactaactcgtcatctagccttaggtatatctcccaatgctatccctccccgctcccccgaccccaccacagtccccagagtgtgatgttccccttcatgtgtccatgtgatctcattgttcaattcccacctatgagtgagaatatgcggtgtttggttttttgttcttgcgatagtttactgagaatgatgatttccaatttcatccatgtccctacaaaggacatgaactcatcattttttatggctgcatagtattccatggtgtatatgtgccacattttcttaatccagcctatcattgttggacatttgggttggttccaagtctttgctattgtgaataatgctgcaataaacatacgtgtgcatgtgtctttatagcagcatgatttatagtcatttgggtatatacccagtaatgggatggctgggtcaaatggtatttctagttctagatccctgagaatcgccacactgacttccacaatggttgaactagtttacaatcccaccaacagtgtaaaagtgttcctatttctccacatcctctccagcacctgttgtttcctgactttttaatgattgccattctaactggtgtgagatgatatctcagagtggttttgatttgcatttctctgatggccagtgatgatgagcattttttcatgtgttttttggctgcataaatgtcttcttttgagaagtgtctgttcatgtcctttgcccactttttgatggggttgtttgtttttttcttgtaaatttgtttgagttcattgtagattctggatattagccctttgtcagatgagtaggttgcgaaaattttctcccatgttgtaggttgcctgttcactctgatggtagtttcttttgctgtgcagaagctctttagtttaattagatcccatttgtcaattttggctttccttgccattgcttttggtgttttggacatgaagtccttgcccatgcctatgtcctgaatggtaatgcctaggttttcttctagggtttttatggttttaggtctaacgtttaaatctttaatccatcttgaattgatttttgtataaggtgtaaggaagggatccagtttcagctttctacatatggctagccagttttcccagcaccatttattaaatagggaatcctttccccattgcttgtttttctcaggtttgtcaaagatcagatagttgtaggtatgcggcgttatttctgagggctctgttctgttccattgatctatatctctgttttggtaccagtaccatgctgttttggttactgtagccttgtagtatagtttgaagtcaggtagtgtgatgcctccagctttgttcttttggcttaggattgacttggcgatgcgggctcttttttggttccatatgaactttaaagtagttttttccaattctgtgaagaaagtcattggtagcttgatggggatggcattgaatctgtaaattaccttgggcagtatggccattttcacgatattgattcttcctacccatgagcatggaatgttcttccatttgtttgtatcctcttttatttccttgagcagtggtttgtagttctccttgaagaggtccttcacatcccttgtaagttggattcctaggtattttattctctttgaagcaattgtgaatgggagttcactcatgatttggctctctgtttgtctgttgctggtgtataagaatgcttgtgatttttgtacattgattttgtatcctgagactttgctgaagttgcttatcagcttaaggagattttgggctgagacgatggggttttctagataaacaatcatgtcgtctgcaaacagggacaatttgacttcctcttttcctaattgaataccctttatttccttctcctgcctgattgccctggccagaacttccaacactatgttgaataggcgtggtgagagagggcatccctgtcttgtgccagttttcaaagggaatgcttccagtttttgcccattcagtatgatattggctgtgggtttgtcatagatagctcttattattttgaaatatgtcccatcaatacctaatttattgagagtttttagcatgaagggttgttgaattttgtcaaaggccttttctgcatctattgagataatcatgtggtttttgtctttggctctgtttatatgctggattacatttattgatttgcgtatattgaaccagcctttcatcccagggatgaagcccacttgatcatggtggataagctttttgaggtgctgctggattcggtttgccagtattttattgaggatttttgcatcaatgttcatcaaggatattggtctaaaattctcttttttggttgtgtctctgcccggctttggtatcagaatgatgctggcctcataaaatgagttagggaggattccctctttttctattgattggaatagtttcagaaggaatggtaccagttcctccttgtacctctggtagaattcggctgtgaatccatctggtcctggactctttttggttggtaaactattgattattgccccaatttcagctcctgttattggtctattcagagattcaacttcttcctggtttaatcttgggagagtgtatgtgtcgaggaatgtatccatttcttctagattttctagtttatttgcatagaggtgtttgtagtattctctgatggtagtttgtatttctgtgggatcagtggtgatatcccctttatcattttttattgtgtctatttgattcttctctctttttttctttattagtcttgctagcggtctatcaattttgttgatcctttcaaaaaaccagctcctggattcattgattttttgaagggttttttgtgtctctatttccttcagttctgctctgattttagttatttcttgccttctgctagcttttgaatgtgtttgctcttgcttttctagttcttttaattgtgatgttagggtgtcaattttggatctttcctgctttctcttgtgggcattcagtgctataaatttccctctacacactgctttgagtgcgtcccagagattctggtatgttgtgtctctgttctcgttggtttcaaagaacatctttatttctgccttcatttcgttatgtacccagtagtcattcaggagcaggttgttcagtttccatgtagttgagcggctttgagtgagattcttaatcctgagttctagtttgattgcactgtggtctgagagatagtttgttataatttctgttcttttacatttgctgaggagagctttacttccaagtatgtggtcaattttagaataggtgtggtgtggtgctgaaaagaatgtatattctgttgatttggggtggagagttctgtagatgtctattaggtccacttggtacagagctgagttcaattcctgggtatccttgttgactttctgtctcattgatctgtctaatgttgacagtggggtgttaaagtctcccattattaatgtgtgggagtctaagtctctttgtaggtcactcaggacttgctttatgaatctgggtgctcctgtattgggtgcatatatatttaggatagttagctcctctggttgaattgatccctttaccattatgtaatggccttctttgtctcttttgatctttgttggtttaaagtctgttttatcagagactaggattgcaacccctgcctttttttgttttccatttgcttggtagatcttcctccatccttttattttgagcctatgtgtgtctctgcacgtgagatgggtttcctgaatacagcacactgatgggtcttgactctttatccaacttgccagtctgtgtcttttaattggagcatttagtccatttacacttaaagttaatattgttatgtgtgaatttgatcctgtcattatgatgttagctggtgattttgctcgttagttgatgcagtttcttcctagtctcgatggtctttacattttggcatgattttgcagcagctggtaccggttgttcctttccatgtttagcgcttccttcaggagctcttttagggcaggcctggtggtgacaaaatctctcagcatttgcttgtctgtaaagtattttatttctccttcacttatgaagcttagtttggctggatatgaaattctgggttgaaaattcttttctttaagaatgttgaatattggcccccactctcttctggcttgtagtgtttctgccgagagatccgctgttagtctgatgggcttccctttgagggtaacccgacctttctctctggctgcccttaacattttttccttcatttcaactttggtgaatctgacaattatgtgtcttggagttgctcttctcgaggagtatctttgtggcgttctctgtatttcctgaatctgaacgttggcctgccttgctagattgggaaagttctcctggataatatcctgtagagtgttttccaacttggttccattctccgcatcactttcaggtacaccaatcagacgtagatttggtcttttcacatagtcccatatttcttggaggctttgctcatttctttttattcttttttctctaaccttcccttctcgcttcatttcattcatttcatcttccattgctgataccctttcttccagttgatcgcatcggctcttgaggcttctgcattcttcacgtagttctcgagccttggttttagctccatcagctcctttaagcacttctctgtattggttattctagttatacattcttctaaatttttttcaaagttttcaacttctttgcctttagtttgaatgtcctcccgtagctcagagtaatttgatcgtctgaagccttcttctctcagctcgtcaaagtcattctccatccagctttgttccgttgctggtaaggaactgcgttcctttggaggaggagaggcgctctgcgttttagagtttcccgtttttctgttctgttttttccccatctttgtggttttatctacttttggtctttgatgatggtgatgtacagatgggttttcggtgtggatgtcctttctgtttgttagttttccttctaacagacagcaccctcagctgcaggtctgttggaataccctgccgagtgaggtgtcagtgtgcccctgctggggggtgcctcccagttaggctgctcaggggtcaggggtcagggacccacttgaggaggcagtccgcccgttctcagatctccagctgcgtgctgggagaaccactgctctcttcaaagctgtcagacagggacatttaagtctgcagaggttactgctgtctttttgtttgtctgtgccctgcccccagaggtggagcctacagaggcaggcaggcctccttgagctgtggtgggctccacccagttcgagcttcccggctgctttgtttacctaagcaagcctgggcaatggcgggcgcccctcccccagcctcgctgccgccttgcagtttgatctcagactgctgtgctagcaatcagcgagattccatgggcgtaggaccctcagagccaggtgtgggatatagtctcgtggtgcgccgttttttaagccggtctgaaaagcgcagtattcgggtgggagtgacccgattttccaggtgcgtccgtcacccctttctttgactcagaaagcgaactccctgaccccttgcgcttcccacgtgaggcaatgccttgccctgcttcggctcgcgcctggtgcgtgcacccactggcctgcgcccactgtctggcactccctagtgagatgaacccggtacctccgatggaaatgcagaaatcacccgtcttctgcgtcgctcacgctgggagctgtagaccggagctgttcctattcggccatcttggctcctagtacttccttatttttaagcctgagtaatatcctgttgtgtgtatatactacatattctttacccatccatttgttgaaagacatttaaattgtttccatatcttggctattgtgaataatgccacaatgaacatgggaggatagatatctcttcgtgatcctgatttcaattcctttgaatatatacccagaattgggattgattgctggatcatgtgatgttggtcaaagggtacaaagttttagctatgcaagaagaataatttctggagatctaatatacagtatggtgatggtagttacaatacttcatatttgtatacttgtaatttgctaagagaataaattaaatcttctcaccactcgtgtgtgtgcatgcacacacacaccacacacatgcacagagataattatgtgagataatggacatgtttattaggttgattgtggtgatcatttcacagtgtacacatatatcaagacattaagctgtataccctaaatatatacaatgtttatgtgtcaatgatatcttaaagctgttatttaaaaaggggtcattactggcaaaaatacaataaaatcatcactttcaagtcccataatggaggtgataaaagtaatttagtaatatgttcacatccttcaaatcaaatatagaaaattcgtttgtgctttgatccaaaatagacccccccaaaaccattatacacaaagatgctctaggttagagctagagaaaacagaaactgagaaaaatgaaacattccaccaaactaggggaatggctaattaaattatgatgaatccattcaatggaatattatataacaatttaaaataatatattaacaaaatgaagtactcatgccaaattttaaaaatagcatgtggaatttatacacacagtaagactttggccttatacaatattatataaataagtctagactaatcacatttcaaagtattaacagtaactgtctcaactcttgttagtaacattatgggcactctactctttcttctcttgtttttcaaattcttttctaccaagagcacacattactcttaaaactagagttttttagaaaaatagaaagaatatatgctaagtaatcagggttaaaatgtagactggagaatcctatagtggcataagtcatgggtagtcattaaactccagggagacattatgttgtctctcttaataactgtttagtactagattttataagataaactaaaacattttaatgattcagtcatttgtttaccaaaagtcaattagagccttaggcctttgtcattttgtgatgttcaatgaatgaacatagtgtttaaaattggtttgataaagataaaacttgacattaatgtacagtaatccattttcttacttttcttcagaaaatatgtcatgctcaattttaatttcaagaaaatatagagcaaatctacataaggcaaaaaccctaaagatttgtttgccctaagatatgttgtgctgactataattggattgtcggaatgcatctgacatatgctaatgaaaaagtaagaaagccaaagtatggtttatttgcttatattagtcctttttgtagtcaaaccagcaacacttatttacctccttcttagattctaggaatgaaaaattacaaaaccacatcaccttggcccttaagtaacagatgaaaactactgacagacggcagcgaatcatgtcttccaatgaatagcagaataatgctggaaattggaaaaattcaatgtcaaggtgggcccaaggattcataacagacttcataaaagaggtgacaatttgacataggtcttgaaagcaacgcagtggtaaagaagagagaccttcagataaactcactagattattcttcaaagtggtgatttcagtttccattctaatcagccaggaatgggagttcccatgttcctcctgctagccaatacttgacattgtcagacttttaatctgtgtttgtaacattggacatcttttgctatattaacttgacactatatgtcttctcttcagtgaaatgcctgaatattatgcccaatttctcttgagttgtttatctttttcttattgacttggaggagttctttttgtagtctggatgctaattccttgccaggagatacactccctcctttctcagagccagactgcctgaattgtacacgtcataacagtatgtccttaaacaagttacttagcctctctggctttagttttctcaggagttagattgggataataatagtacctaccgtaaagaattgtgaagatgaaatgggttaatatatggagcacatggaactctgttccgctggtagtgcgtcataataggggcaggctgtcaatgttgttactaacattattgcaacctcccacccaggtgaacgattttctaacccaccttttcctgaagggtgctgtcctctaggagtcctagctttaagcaggaatcttaactccaacttcgtacttgatgtggatctgaggacttgtctccagtcctcatgccgtatgcaactcaggatctccaggactgagaaagccttcaggaggcccatggtctccatcacctggcatgactttcctgcttcctcttcctttctggcccttactttttaaaggattaatgtgagcaggtatttgttattttgttctgcaatgtttctgcatctttaacaaaaattttaagagagaagttgcttgtaaactactcagtatgtcatgttgatgaacgtagaagtctttgtccattcttccctctagcatggtgttcttttctttatgagaattcattctttgttaagcatatgaaatgttttctctcatattgtgggtatatttttatatgcagtacaatttcatagtcaaatctgaccactttgactttattatttctgctctagaagcatgcttagaaagatccctcttaccccaagattacattaaaaatgtttttattatttgtatttccatcctatatgttatatgataccaaatgtcatttagaattgattctgacatgtgaagtcaattagggaatctaacccttttcttcaaaaatgtttagccagttatcacaacccctcttattgagtgatcactctttccttagtggacaaagccctagatgtgggaatttccatcgacctggctgccaactgtactttgtattccttctgcagggcatggccagcagtcacagcaccagtctgctgtttctcacacctgaataggaaagaacttgcactattccctactggacagacattcatattggcagaaagaatatgaaaaaaaagtgacattttaaattacttgtgcaatgagtccaaaaacattatgactagaaatacccaaataattatgggcagaaataaacataaataagaggatatcaagagattgctggaagccccattcttattggtaggaagcagtcagggcatcttcgttcctctcattagaactattacgtttcagaatgcaaatcctagctctggtcctcactgagtgtatagaatggtacaatttatttaacttacctttgctaattcagcagacatttttcagcacctgttatgtgcaagttgtttactggcctgtgagttttaggtaccttaatcatagcctgcattagacagatgtatgccagagccctgctcttagtagaagctcaatacaagattggatagttgctgcccacctaactcttcagaccctcaaccaatttaaattggattaaacacacacaaaaaattcagaaacaagactggcttggccttctatgtatttccttaacattttagtgacacatagaattcctttcttaaaggggattagcattctacatagtaaaacattttaattataaaaattatatttattacatgaagtctgttcttcccaggcaaggtctaatccactatacatgactcattttcttgtgagttttactttagcctcagcctttcaaaatttccgagtgaaatatcattaatcctggtgattcatggcctgcgcctggtattttgcagtctttagtgtgaaatccttcatttagaaaactgcaaatggaggtgagaacctaacatattactttggaacattaattatgaaacataattacaaacacaaatgcctacaatggtaataattttacagtttgtaattgtaccagaaacctccaactggatgtacttgtaacatcctatggttggattcgtttcaatggattgcaaaagagtgagccatcagcagggttctctgtagattagtctgatcattaagatccttgtcctgggttacacatccgaggtagcagtcaactgagtcattttagtctaggccatccaggccagattcacttttcctccctcttgaagacctggaggacagtctctaaatgcaatcaggcttcatctgtcagtgggcagtgcctagtccctgagatagtgccctcccgcaggttgtggtgcagggtactcggagggtcaaaaacttcttgctgcattttctgttttcgcgctggacagacttgcccagaagtcaccctctgagaacactgttggagatcacttcctgggctttcgagtgagggaacccccattgcactcccatcacactccccataccagtgggtcctgtgtggtccaaaggggtccctgtcgctccaaacagaagagagtgtggtggcatccttatagcatcatgttgggagcctttgcagagaaactgatctggatttaaactgtagctctggcattctctccctgtgtggccttgggcatgcatcttaacttgcttcatgtgtaaaatgggtacatcgcagggtgccatgaggactggggatgacacacatggcccagcaggaactcaacaaatggaaattcacgtgatcgtcatttcatatcacagtacacagcatttatctatctgaggcttgatattgaacactcctatgctgcaggctctgtgttagaaaaggaagacacaacaatgaaagatgcagtctctacccttggggagtttatggtttagagaggagagaattaggaaaatgtgaaattacctatgagccaaggcaggcctgaatagtaggggctcctgaaacacttagggagctcttagcccagcctcagatagctgctgaggcaaaaacctcctgagaagctgatggccatgattttgaaggagaggcaagagtctgccccgggaaggccgaaagagccctgtctgcagaggtggtggcacttgcgaggccttggggatgggttacaggtgtgcatggctcccaaggaccttggcacaaccacacagctgagtcctttgtatgctgcagtgtaagctgaagactctgaaatgggtgggttgtgaactgttcaataacctatttgatgcactgtccaaagagttaatgaaatctgaacaaggaggaaatgggtctccaggaggagaatagcagacaccacaattctccaaagagcttttgagtggtgctactggccacggggagatcagtgctctaggatccaataaacctgctctctccactgtacacacaactttcatatttatgtatctcccagtcctagctccagagaacgtcccataagaaccagggtgagccaagagttttttataatgaagtgggagtggcagccggtaaacagaaagcagaataggtttgaaagccttcaggccaaatcaaagagaacagagaaagagaaaaccacaggtctctgtgggtaacttctgatatgactcaagtctctatcttgtacactggaaatagcagcttttctaagaacatgatatcctttctcatttatacggtataattgttactttagggaattgtcttcactctatttggttcttggtggaatttgatttcattatatgatcttgtttgtgggttttggggcttaagctgtagacagcattcacttattcacacaataaaatatagaagttacgctgataagattttgctataatttttatacaaggtaattaaattccagcctaatgtgccaagacagaacattattatatacatttggcatttgtttagccccagaaaattcactcatccaagaagtccactgatagtgtacccatctaatataattaccctattatgcataaaataatgtgtttaaagagttagggaacctgctttcttcactgcagcaagttgtaaatgaaatgaaatcaccctggctataatattaaaagtattgagaacattttttactcagtctgctctaactgagtgaaggcaaatttttcagaacgacagaatattgtacacatttctttggaggtaagaatcttaagaacttctcattaaaatgttacttaggttgatctatataacacattctaggcctctctagttgacagcaaagtaatactggtgcctgtgtgttgcatgtaactgtggcagttcaggaatcagttccaatttgctgaccatcacagcattcgttcattgctagataaggtttctcgtagcacaatttcttgattgacggtcagtcagactcatctgtttatctttaaagccttccttccacttgaccttcaaaatgccttctaatgctatatatacaaatagaaggtgaagaaaaatcatttgaaccaaacaacagagtaatttcaaaactatctttttcaggttaaaaaaagagcagaaatgattaagaaaagagcaactataccttaattatcttggcattgcccacagtgccttgatcatgatatacacccaaaaagtagtcactgaataaatgaatgaatcagttaatcatttagttaatgaaagaaatgtcttcacgttttgcaaaacagtttggttaagtagttggtggaagttctgtttattgacaaatgactagaggaaaagattactgtagataatcaagagactagaaatggctactttctgtgtgtgaaagtgttttcttgcattcaaactctatttctgagataggtctacctattagtgactgccagacctcagagaaccttgactcctctgcagcaggaccataaccctgagtcctaaaggctggatgctgtcctcagatgtgtttgataaacctgtgcaattattttttgagactctcaaatattgagaattttcatgtccaaatttctggcttctttggcatactgcaatttctggcaacactagacccatattcttatgtgtcaatgaatgtctgtggttaagtaacacccaccccttctagatggcatgtcttgcctagttttcttcattctcaccagctgctgctaactccaacatggcagtctagtgccaatcgatgtttattatcttctttgcattattacttctcttaaagtaggtgaatacttctatggccccagattgcctggataagtacgtgttgtcagaaaaaatgaaagagagcaaattttcatttggaaatgggataatcatctcttgctgattaatatgcaaatgaaccatgtgtggggaaagaataccataaagcttgcttcaataattcactttacttgcataattcctgtaagcatttgaatgttaaacccttgctttacaaatatctgtgaggaagggaagaggaaattgagcctgtttgcaataccagaatcaagtcagaaaaaaaataaaatggaaaaatctgggaaagtatagacagcaggagataaaaggagaaaggaaacatttccaactcaaacttcccttttttctatatccacttcttgccaaatattgtttttaattattctctctcttttcattttcagttttaattattcttaaactcttcccatcttctccccaggaattttttggcttatcaacagctggaggtaggatgggcttataaggaaatgaagtccaacaccaacaatagtaatcatgataacaatatctgtcatttattgcccttcttctctctgcctgccaccaggttaggggatttaaatacattagccttaatcctctcgataattatttaagatagcattgcacccccattcttatagatgacatgaccaaagcttacaatgattaagtaatcttccccagctaaaaagagcagaacagagattcaaattagatccacttgatcgcactatgcatgctctttccacttggacttgcttaatagttggctaatcattccaactggatcattaactcatgcttaaaaagataatgaccatatcaatctctttcagagttcattgatcttgaattagaatttacaaaaaaaattctcttccaataatgtaaaccacagttagtctttactttcccaaacaaactcatgaaaagattttaaaatttcagagctttcattgcatagttttctaatatttgaacatatatattattatatatacagaatattagctataataaatatatatttcaaatatgtatatgaacatatatatcattatatataaagtatattagctataatattgtattagtttgttttcatactgctgtaaagaactgcctgagactgggtaatttataaaagaaagatgtttaattgactcatagttcaacatgctggggttggcctcaggaatcttacaatcatggtggaaggtgaaggggaagcaagacaccttcttcacaaggcagcaggaaggagaagtgccaagggaagggggaagagcgccttataaaaccatcagttctcatgagaactcactcactatcaggagaacagcatgggggaaaccacccccatgattcagttacccccacctgatctctcccttgacatgtggggattatggggactatgagcattacaattcaagatgagatttgggtggggacatgaagcctaaccatatcaaatgtatacaaagttctagtgtgtgtgtgtgtgtgtgtgtgtgtatatatatatacacacacacacacacacatatctgcaaatttaatctatgtatgggatttaaactattttctaatgaaaatacttatttgttcgttcattcattcagagcagcagtatagagatgaaaacggagaggcaaaatctgatcctaccatttactaactacaaggtcttgctcaaactacttgcctatctttatttcagtcttcttattttaaattaagatgaagaatgccagctttatatgaaaaataaatgagtatatagggatattcaggtcatctatttctttttgactatgcttgaatagcttgtttgtttcaagaaatttgtccatgtcatgtaagctgtattaattgtcataaagttcttaataacttctcttattatacttttaatgtggaatctgtagtggtatcacccctctcattcctctaagtggtaatttgtgtcttctctcttttttgtgatcatttttgccagaggtttattaatagtatttaccttctcaaagaaaaagttttaggtttcattgatttttccttattattcttctattttatattttactaatttccactcagatatttattattttctttgttctgattactttggtttgcatttgctattcttttactcatttcttaaggttgaacctgaggtcattgacttcagacctttcttcttcttttctaatagggattttagtgctgtttccttctaattattactttagtagtggcccacaaattttgatatgtttactcttcactcagttaaaatacttaaaaatttttcttcttatttgttctttgacacatgggttttgtttattttccatctatttagggattttcctgttactaatgctcatttaatttcatgtggtcagatagcttaccttgtgtaacttgaattatattaaatttatttgtttacaaatgtatttgtttatctctatttttaatttttatgggtacctagtatatatgttcaaatattagaaaactatgcaatgaaagctctgaaattttatatatatataaaacgtagttatacatgttatatatatacaacatagttatacgtgttatatatatacaacatagttatacgtgttatatatatacaacatagttatacgtgttatatatatacaacgtagttatacgtgttatatatataacatgtatatatataacatgtataacagttatacatgttatgtgtataacattgttcataacagttatacatgttctgtgtataacatttatatgttatatacattatatatgttatatataacatatataactatgtataacatatatataactatatatgggttttgtttatatatataatatataatatatagaaacaaaacccatatatattatatattattatatataatatattatatataatataaaacatacatatatataaacccatatatatatatatatcccatatatatatatatgtatatatatgggttacatgagatattttgatatgggcatacaatgtgtaataatcacatcagggtaaatggggtatccaaaattcttttacatttattgagtcttatgaacacgaatatgttctattttcgtaaatgttctgggtgtaaagaagatacatgtgtgatactgtgggttatagtgttctataaatgtcaatttaggtcaataagttgacaatatcatttagatcaattgatagataatgtccaatttttctatatgtttactgatttttttgtatacttgttctatcagttattgagagaatggcattgaaatatctgactatagttatagattttttaattctttttgcaattctattagtttttcttcatatattttggagctctgttattaggtgcataactctttagaattattatgtcctcttgataaattgacccccttatcaatataaaatgaccttttttattcgtggtaaatttctgtactctgaaaactactttgttgacattaatttagccattccagctttcttttcaataatgttagcattattttatcttttttcattttttaattttaacctatttgtgcctttatatttaaagtatgtttctcggaggcagcttataatgttggcttctcttttatacaatctggcaatgtctgccttttgattaattgcttctattatgattatgatgtggttgtttcataaatgtgttattttgtatttttatttgtcccatgtgtcctggttccatgtttttccttttgttaaaatcttctgttgggttaagtattttttatgattcccttgtatttcatgtatttgtttcaaatttttgttgtgtaattttagtggttgtcttaaagtttgcagcacatatttttaacttaccacactagaatgtcaaaagagattataccattttatatatagtataaaaacatggaacatttttccattttccctcttaacctttgtgctgtattatagcttttacttctatatattatagatcctacaatacattattacttttacttttaacaattatcttttggagacttaaacaataagaaaaaatttttctattttcccatatagttgacatttctgatgctcttcattcctttatgtagctccagactttcatctggtgtcattttccttctccttaaataacttcctttcatatttcttgaagtgcagattggctggttataaattcctttgtatgtatgaaatgtctttattttgtgctcccttttgaaagtgagacaccctactctgtctcctcagcttgggagaccactggactctgctgggatcccctttttgctatactgactgcagactttctccaggcagtgagctgggcagtgacacccttcccccatttgtgtcctgcttcttaggggtgactgcttccattgtcagatgtccagtgccttgagaaactattttatctcttttacctgttttttagttgtttcaggcataacaattaatcaggtcgctcttgctccattttggtcagaggtgggatctctgggctctagatggaactggattttcctgagagttcttcccagtccacccagctagaacagagcggccttctcactggacactgggcattttggtcccaggtcatagaagagcagcatcctcacagtgtgacctcagctgagccttccactgcgtacttggtttcattttaagtcccctctctcaagacttcctaaatgtcaattatctgacccacctgggcactacatagaatattcttattgttgttgtactggatttacaaactctagaagcacattagagaaaatgaagggactttgctaaattttaagctgttccttgagctgccctcaatgttattttatccttttagagtccaagtttttccatagttccccctaacgcaaatgcacactcatgctcactctctctcacgcacacactaagacacaagggagtattgctcaggccctcaaagacagatcgccacagggacttctgtgagacactttctcagcacatattttccagccataatgtcttccgaaatcaaagccaacctaacaacagaatttccccagtaaaatcacagctaattgactctgaatttgtaaacgaggcacacatccaaatccatgtgggatcttgttgtgaccagcgtgtgttttccagattctctaaactcacagagtgaaaagagggtcatctataacaaatcctctcagtaggagatcccttcctttctccaatttgagaggcccacagagtaatcattagacaaaggatcgtttgtgtcaagttttaagaaaatttggccaaagcgatttaatcaagcccaacggaaagctttctacgagagcctgggccaccaggaactttattctcgccatccgagatagcggctcagcacctcacatggtaagaggactatgtattcctttcccttcgtgaaggctctcaagttctgacctgggacctgagaaatgtttgaattgggtaacgtgaaaggagcttctaatctactaaacagaacatccatacatgtcatgtcctgaggataaatgttggcatctcctgtgattgaagcttagcactcctgacctcctgaggtgaaacttcaatgagctttagctctttcagccatgagttgtttaggcttgagctaagcacattacctgagctggtttctgtttctttatctgttggtacaaaagggaggtgacaatttgctttctaagatcctttccagatccaacagactttgattatttttgtttaggtactgggcaaaattactctgaatataatgctgtttagttcagtaaattctaagaaacagactaaaatgtgtatgaccaatatactgggtccatgtgacaacaacaacaaaatccagataactggcaaaatctaagccattgacttaattctttacaccttattgaggctaattcattaataaaacaggtcatccattgagatttcatgtgaccataaataatgagtggcagagttagaataaagtctaagatagctcaaagtttttcatcctgtgcaaagctttcactctatatattattccataaaataaaaatatgccatattaaaggaaagagagctcagaattgaaaatgtaaaacttcccatcacttcaatttatcctgttagcatctcaaattcaacgttacattaacatggttcattacacttaatgatttcaatagcaataaagacaatagttttcagaaatcacttagatcttcccatggtctttagaaaaagatttggtttactttcctgcatagatcctttccaggatttttaatctaaacatgatttctttggcaatccaaattatgaaaattattagcacagctagccactactgcatccttacagtgatgaacaataagctaattaggtgtgtagtggcatattctatcggtgattaaccagctgggatggagttatttacacctctggaagctgtgtaaatcttacacttctgaagctggcaatagaattttaaacttacacttaaaaggctgataaacactttaaatataagctttattgttgttataaaatttcattttttatgagatttgcattcctttcattgattaaatactcatatcttcatacatttatatgtttgtgtttatgtgtatatatctggtcctgtgtaggcagaaaacattaaaatgtgcagattcaaaggaaatgagaattgatgctaaactttgtggccttgttaatgttttggattcaaaatcattttgaagatctaaggtcccaatagtatttcatctagtaaaaataaaactgcgattcccttagcaacatgctacagtacagggcccataaagtacatttgaaaaccaaacgactgtaaagtgatccactataatcaaatctgtcttgctgtgctagatgatatgaactgttctttaattgttgttttgcagagataaataaagcaaaacgctagattctgatttatgtagcattttacaaaccaaaatccatttttaaaaaaattttgtatcgcattccctcagaagcaccagggagaattgaggacgtcatgctgatgacttttattagtgtgctgacatataaatgatgctacctgtgaggagtgggtaggagaatgggcctaaatgcaattatctcccacttcatgtccaatcctactcatccatcagtgcagcccctggctcctttatagacgggccctgcctgccccacctcatttagccctcctcctcctgtagtcctagcaactgttatcctacctttatttcatcatgtagccagagtctgccaaatgacaccttttcagtcattgttagacgagtcttgctatgttttatcttccaagtgtgggtctctgggagcttcataaatagcatccaccaggattctgaataaattgcaaattcggtcactcaacgagaaacactcaatgtatcaggcacggtgctgggcagaaggagaccccagggaatgacacggatataaaggtgtgttctcctggagcctgtattccaactggaggagacaaaagtaaacaataacccgagaggctgtgcagtgactgagcgcgggcccctccagagttactcagtggggcaggcactgcagggttgctgagccgggtccgggctcccttaggaggatctgctgcagtgagatgtgcggcccagaggagcagaggaaactcttttctgcacataggtgctctcaggtggaaaagggagaagctgtgccagatttatcaatcaggtgaattagctcacctcccctggaaagcagtgagtaaggggtagagaagaggaagaaaaggggctgggagggtgggcttcctgtcatggaagatttatcaggagtggagaccttcctcctgctgcagtcatgcgacacttaatgactgggataccctctaagaaatgtgttgttagatgattttgtcactgtgcaggtagtgcacttacacacacctggacgggacaaccccactacacacctaggccctgcggtgtagccgattgcccccaggaaataaacccctacagcaagtgatcgtcctgaatactgtagacaattgtaacacaatggtaagtatttgtgtatctaaacatagaaaaggtgcagtgaaaatgtagtataaaagataaaaaatggtacacctatatagggcatttgccataaggcttacaggactggaagtggctctgagtgagtcagtgagtggtaagtgattgtgagggcctagggtatcactgtacactaccagggacctcatagacactgtgcacttaggctacactccatttatacaaaatagttttcttcagtaaaaaattaaccttagctcactgtaagttttttactttataaactttccaattttttaacttttgactctttagtaaaaacagcttaaaacacaaacacattatacagctgtacaaaatattttttctttacatccttattctataagctctttatttttaaaatattttatttctttttactttttaaactttgttgctaaaaacaaagacacaaacatacacattagcctgagcccacacagggtcaggagcatccatgtcactgtcttctacccccacttcttgtcccactggaaggtcttcaggggcaatggcaggcatgaagctgtatctcctgtgatcacagtgcctttttctggatgcctcctgaaagaacaggtgtcacactaactgagctcctgtcacacggaaggaaacaccaggggtaggaaaaaagttccaccctaacatccacaaatagatgtgtttcatgaggacaaggagcaagttcttacacttcttgatatttacatgcctaagatttgttgtcctaattaacatattgtaccccttttattctaatcctaaggtccaaaagaaaataagttagatatgttttttcaatagccaaaacagaaatatgaatgcaattgttattatgacatttcacattcattcagggggaaactcagcatctgcaaagccagaagacaaagtcttgcttttcaccattcagtaagagccaatggatcttgaagtgaacagatttggaaaagtgacctgaacagccaagatcagcaaataacaaggaacacaaagaaaagctagtaagaaagtaggaaaatcaatatggaaattgaccactaatatatccataagtgtatatacgattttaaacaacagatctgaatctgctgcacaccagggctgctgtgacgcatagccctggcaggtgctttctcattgtcatctgtctgaccgactgggcagagcccagctccagtggctacattcaatgttcatgcaccctctggagctgtgccaggctgtgaacctatttacaccctataatgttctaactttactggagaaaggactgaaacagtatggttatcattctctagttatgggactacccattcatttccctgacagaagtgtaaatacttgagtgcaggcaccatctccgcttcacctttgcacccttttgaacgcacaacacactacaggtgtagagcgagtactcagtaagtgttcatttaatgatccaaagctttcacggtctgtgtaactctctatagctgaacttccaaaacagtagccaatatctatacatggttaataagcacttgaaatgaggttaacccaaattgtaaaatacaagattttgaagacttcagatgaaataatgcaaaacatctcattaataatatttatattgataatgttgaaatggtaacattttggatatattaagttaaataaaatatattattaatattatgttttcctgtttgtttttactttttactttggctttgagaaaatttaaaattatatgtgtggttggtgtttgtgatttacattagatttcttttggataaggacggccaccttagacaaaaacctggatggtaatttgacttaaagtttatttatttatttatttatttatttattttggtagccatactcataagttagcactacgccaatggagtgtaaaagttttgctgccattagaacttgcataataatttcactgtggcatataaagaatatttgtattgcaataataacatgattaagaatatcaatagtcagtattacctgtacgcctgatgaacttagaagtaaattatgctctgttcgacaatgtggattgtctttcccttctgaagttaccctcagatatagtcaaatcagttatgttttggatgtccttctaaaaatgatcactgaggtcatgcagtggaaggaattcagattttgaggagctgtgcacatctgaatgttagactctgaaagaaactcgtgggtgtggaaataagtgtttctggtgctgcattagtataaaaatccatcacatctaactttgcacactatttaaaaattataaatcaagataatgtattttacatattcacttttaaataattgctgataaaatgaaaaatattcattaagggtaaaagtaattttactttatggaattgacaaatataattgctttaaaattagtttttgaggtttttttttttttttacttgaccaaatcttggcttttggttaatttgaaaataacatgatagaagcatacctgatgaaaaattataagatgtgataaaattacttgaaccatttttgtcactgttagtcatagtcttagttaaattttgtaatatacgtcacataggaacatcttccttaaaatttttcaatattttgaaaaacatccctctcaaatatttttaacaagtgagaatatgcagtgtttagttttctgtttgtgcgtgaattcgcttaagatagtggtctccagctgcatagatgttgctgcaaaggacatgatttcattcttttttatggctgcaaagtagtctatggtgtatatgtaccacattttctttatccaattcaccactgatgggcaactaggttgattccatgtctttgctattgtgaaaagtgctgcaataagcatgtgactgtatgtgtcttgttggtaaaatgatttgttttcttttggatatgtgcccattaatgggattgcttggttgaatggtagttctgttttaaattcttggaaaaatctccaaactgttttccacagtggctgaactaatttacattctcaccaacagtgtataagtgttcccttttttctgcagtcttgccaacatgtatttttttttttttacttcttaataatagccattctgactggtatgagatggtatctcgtggttttgatttgcatttctctaataattactgacatgagcattttttcaggtttgttggctgcttgtgtatcttcttttgagaagtgtctgttcatgtattttacccattttaatgggtttacttgttttttgcttaattgtttaagttcgttataggttctaaatagtagacctttgtcagattcatagtttgcaaatatcttcttccattctgtaggctgtctgtttactctgctgatagtttcttttgctgtgcagaagctccttagtttaattagatccatttgtcagtttttgtttttgttgcaattgcttttgaggacttagtcataaattctttcccaaggcccatgtccaaaatgacatttcctacattttcttctaggattcttatagcttgaggtcttatatttaaattctcaattcatcttgagttaatttttttgtatagtgaaaagtaagggtccagttttattcttctgcatatgactagcaagctattccagcactatttattaaataggaagtcgtctatttgttgcttatttttgtcaacttcatcaaagattagatagctgtaggtgtgtggttttatttctgggttctctattgtgttccattggtctgtgtgtccagctttgtaccagtagcatgctgtttttgttactatagccttgcagtatagtttgaggtcagataatgggatgcctctgggtttgttctttttgtttaggattgctttggctattcggcctcatttctggttctatatgaattttagaatggttttgtttccaattctgtgaaaaacgacatttgtagtttgataagaatagtgttgaatctggggattgctttagacagtatggtcattttaatgataccaattctgcttctaatccatgagcacagaatgtttttcattcatttgtgtcatctatcatttttctagcagtattttgtagttctgcttgtagagatcttgcacctcctttgtcagatgtattcctaggtattttctgtatgtggctattgtaaatgggattgtgttcttcattttgctctgtttgaatgttattggtgtatagaaatgctactgatttttatacattgattttgtatcctgaaactctgctgaaatagtttatcagttccaggagctttttggtggtgtctttagggctttcaaggtatagaaaaccacaaagagcgaaagtttgacttccttccctatttggatgccttttatttctgtctgttgtgtaggcactattttaaaaggagtgttatcttcaatgtatttgagtgactagaaattacattttaattgttattaaaatcataataagtttttatgaacatttacttggctgaattagaagcaaagagagagggtatgacctgtgtaataccttgtgtttattttctttttctctgaatttctgtcttccccttttattaagtaaataagatacaaatgatgagcatcattttgttgcaggcattaggtgataatctaggaaggtctggagacaagacgaggtgttctcaaagccaccggcaggctgccctatcaccaggctagcatcgcatttcaaggggcacagtcgtctttctgaacagttaacttgtattgcctgtttcaaatgtgacagtgtgagttgggttctccctgcctgactagctttttaaaagatttttaaagagggatgggcaagatataattttttaaagagggatggacaagatataatctgatgggaaagatctactctgggaaaaatacaaaaattctgtgtgtttaattttagcagattaagaaatcactgaggaaaggaacaattccagagtcaagattttttttttttttattcctcaaatctgccactaggttcagcctgttaatttagaaaattgatgacagatctatttatagaactgcaagtatttttgtaatggtaatggttttgtataacccttgaaaaaatatttcgtctggcttcccattaattaatggttccaaagatgaatatggggtcgaaatgaatctaaatgagctagtaagtttttttatgatatgcaagcacaggaaagttacaggatgagagcattttcatctttcatatatttgacagggaaactagaatatcaaagcttttgtcattgaactctacagtagttattcagtttgatttcaacaaatgtaaaattaggagtccaatatattggaatttgatattattataaattgtaatatatttatatatactgggtaatgtgaactaattttacttatttaggtctgtctttttctcttctattatttggacagtgcttcataaaattagtaagataaggtcaaaatatatttcatattatttcatgtaaaatgtaatatacaaaattaaaatcagaaaatatatgtgatcctaaaatatatttaaaatttgtattgtctagaaatacactcatgaaggagagctgtgttctttctttgaatggctactttcagttaacttttccttagatagactcggtcaagtccatcacttgaataaactgtaaaataagatggaaaacattgtataaaagaataagctaatcacaagtcatgactgagctattttgtacataattgcatacatgaaaatgtgtacatagtgataaatataaacgtggggggagatacagctccaaggcaaggaaatattgacttcagagtatataatcggatttttactacacttacattacatgctaacaaagctattagcaacatcatttacaaaatctacaggttctaagggttgatgatgacataggtcatcgtgaagtacccttttacaaagtcacaaaaatattacgaatctcttttgcagccttcttcaattcatagttgttattaacaggagcttaaaagcaaattaaccaaaagagagagagaaactattaataattccacacttgtctcttgtaaggcatactctgggtccttttcacgtgagtataaaaagtgaatgcagagaaatagaaaaaaatgaaaatacattgtatccaggtggttgttgcagaaagttgatgtaatcttgattgagagagagagacagacagacagacggacagagatggacataaatgcagagatattcttctgaagcagaggacaatatgtaatttagagagttactactcttaaaaattcttacattttacatttttacattttatctttttctattcaacctaataaatattttattagtgagggtttttcttttttcacattcacttttaaaatctctatttgcctctccatttttatgtgacactgtatttagtgtatgagtaagactcaaattcaggcaccttcccatgatttgctatacatggcatccatttactccagtcaaatacattcttgagagggccagtgtgtttatgtcactgtgtgtgtatgtgtgtgtgtttatttttatccctttctcttagaaaaatgttagcattttctgcacacttttaggaatgctaaatgttcccccttccctccttccactacatctgatttggagtaatattcctttacttttatttagtaggcataatgcgatcagcaaacattctactttttacatgttttcctactctcctacccctcatttttactactgtagctacactaccaaagcattatagccatacttaccctccttgcttctttgtaactgtcacttcttcctagtttcataagtaaatatatacctaaccttcaccatcaatgcttaaggcaatgcctcaccagatagtttggttttctgaatcttttcctctagtagaatcctcaagaagttttcatgagaccagtattccctcatttgttaagttgtttcttaacaatttgtttgagacttcatattggaaagttattatggctgagtataaaatctttggctcaaattttttttcctcaagttgcccaatttcttctggtagaaagtattattgtcaaaaagcctgatgacaacctttatgagtgaattggtaatttcgcccagattttatttttattttcagtgaaggtcagtaactttactaaaatatgccccagtgttggtctttcaggattaaattctccagtaatacggcctatccttttagtaggtagtgtccagtcttttggggagggagttgtcttgagtttaatatgtcagcactattctgttccgttgctttgagcttcttgtttggggctatatgcatgttgagtctcttctgcctatcttcatctgtcattttctctaaaacacttcatcactcttttgattttcaatttttaaaaaatcctcttttttgtctcctgtgtttcttaaactgttgtctgttatgattactttgtcttttgttccttccaatttaggcatcatttcctgatatttattttgcattttaagttctttcattaagttctatgtttttaatgtcttctatcatttaaaaaatatgtgatcttgttttgaagcagtatcttgcaagttcttctattgaggggcatgtcttgctagcaggcttttattgtctgtagagacattatgatatttcttattctctcctttttaaaataataattttgtaagggatttgacaacactctttttctatctgcctactcttttagaagggaggattggtcaagataacttttctggttcacagctccagagcctcctcttctattgcctctacaaagtggtttttaaaatgacctcatatttctaggatctgccttctcttctgtctttccctccttttagctggattttctctttcttttactcctctggacctgggcagctccgctcgatttggattttatccctttgctttcctcagtggagagatttgtactagaagggaaatgggggattttaggcttaagatccttttcagacctcgtcaccacccgtgaactggagcgtgcacaacctctcccagcttcaaatatggcatctgttggtgacgttcccattctggaatcaggagatggctggctactctcctctgctgcctctagcaccgttgctgtggtcacatgggtcttagtggtcagaggtctgtccccattgccttatattttaaggaccatgagtgtaccttgcacacaatttcgatgtagttcttctgtatataggttttggttttgctatcctagttgctttacctgtctgtgttaatgaggggatttggagagattaaaaagcaatattgctttcttatttccttaattctccccctttcgcctatagaaacagactcccaggctaaaagcagcagataacaaatatcaagtcttaatttttccaagataaatgaaagctcagcctcttcaactaaagcaaagtgaagaccacagtcatttcccatgtctttggcgagatgtcttcgtattggcaaaaacaggaatccttagaagatcctaattacaggaaataattactcacagacaagttgcccttcatttaaactgtcagggtaacaatgtaaagaaaacataatactttcagtctctaccaatccaggaatggtgtgatcttaaggctgactgccaagagcacaggccagctgttacagaacttaattaaaacagttttgataattagcacaacttgtatatgaatgtgagagtatttctaatgtgaatacaccggtcaccttgtcagttacagggaacagaggaaaaaatcctatgacatatggagttgtgaaccagttattaaaaaacaagcaaacttagaattgctgttgaactatcctccattctttgccaccctcataaaaacaataaaaataaaaccaaacacgcagagacccctcccaatctgatttttgcaagtagtttaagaagcaaaagctgttatgctttgttaaaagtccttttggttgcaaacaaatagaaagggacccagaccggtttgagcggtgagtattccacagagcggctgcctgagtccagcagcagcgttcgcatcatggtgctgctatttccctgcgacgacacacagcaatctttcttaattttgtcatattttcacttttatttactaaggaatgacagatcaccgagaaaatcttttttttcctcctttctatgtgtttcattctgaaaggtccattgctctccactgatactttgcagtctgagcttagtgttataactgttctaaaaatgtctcatttggaaggaagagctgtagcctgctctttattgcccagtacctctaacagccctgccaccatcaatcagcaaaatgtctacaattaactcttgctgttgtctccaaagcctggttgctgcccccacggcctcagcaccctctgcctgcacctccctccatggcttcatgacacgatctcctccttatcttgctcttcagaggctgtgtccctgtgcctgcccgtcctgggcaggtggagcccagtggatgggccttggacctcttctttctccccaaaacactctccatggtgagccatcactttagcccagattctctcccaagttccaaagtcacacctccagacacctcccgggcaccagcactccacttctgtgtgcacagtagccactgcaaagctcagtgtgtccatgatgcaatcataacctcgcagctcccactctgcctgcccctcctagagctgccctctcccatgttggcccccatctgggttgatcgacagcactgtgcacacagtacccaagatagaagccaggagttgtccttggccgtggacacttcctcactctcatgtttaaatcctttatttcaaccatttccttctgtttcctaaatgtctcgtgaatgtctgtgccttcccatcctactgaccctgtaaggttaagccaccttcctaactgagcaatgctgggcaggagatgtttgtctcgctccaggcttgtctcttcccagctcatggctcccaccgcaacctgatcgttcattcttgaaacagatcccatttcttattctcacaattagcgtctttccatttcctttctgatgaactctaagctcctgacagcctccctcctgacctggctccttccctgaagtccagcctcatctctcgctgttgccccaccttcagacccagcttcagctgtcccgaattctgcagttccccaaggccaccattcaccatggtttccatcatggtcccctgcctttgcctgggatgcccttcctgcctcaagggaggcactgtcgtttcctcaggggagcctgctccctgttattccgagttaagcatcagaataatgtgtttacttttcataattttatgataacattctcttataaagatcaattttaatatcccaaaatatttgatttcttcttttgagaattctgacttttcaaaagtagtgatgcacagccgaccacggaccccctgctgggaggcagtctccgaagctgccagtggtcttcggccacacacattcacttggccagccagacacacacctgctgctgccacagtggggcaagtgcactcagaccatctgaaggaaggtggggctgaaacccactgactcatttctactttcaacagggatttattgagcacctactatgtgctcaataatatacagtacctgttgaattgggagtttcatgagaaataaggcagccttagtccctgcccttgctgtactctaaaaacagctaaacacatgatgtaataattgccgtgtaggaagagaacatcagtgtctctggctgagctctttgctacctcacagtcacactgtctgaaatgtgtgcttctcttactgctgaaggctgccgagataaaagcagtcacctcagggtgagagtccaaggattcaaccggaagagagcagcagctagggaccccttggtgggaatgtggttcgtgaggaactggagttctgacgaggagcagcttcgaggcatttgcttctcactaacaggagtgtcccaggaaacaccgaaatccatctaagcaggcgacatgccaattttaattacctgctccagtgagtcatcagttattacatgtaatgaaattaactgtagcactgaacccacagttatgtggattatttgccattttcctcacagtattcaacattttaaaaatctgtggcaagtctgagatttaggaatagtgaaatttccttcgatttgtcctggatcatgatttatttataatatgttaacattgaattggcttaaataatttcctgcttctctttctttgagatttccatcctattaagagcagaaaggagcaatttttgtgagtatcccagttctgatgggccaccatgctcagcaacatttcctaattttttttcatatttttactttgacttactggagaattgcaatgcatgtagaccttattttcacaaaatgcaaatgttaacatgcctatttagctctcccagccatgttccttttcttgggcaattgtcttcttttaaatctcaacttttatttagatacaggtggtacatacgcagatttggtacctgagaatattgcatgatgctggggctgggagtaggaatcccgtcaccctggccatgagcataatacccgatgggtagttttttaacccacccccctccttccaccctccagtagtcctcagtgtctcttgtttccttgttcatgtccacgtgtgctcagtgcttagctcccacttatcagtgagaacatgcagtatttggttttctgttcctgtgttaatttgcttaggataatgacctccagctctatttacgttgctgcaaaggacatgatttcattcttcattatagctgtgtagtatttcatagtgaatatgtaccacattttctttatccactccactgttgatgggcaccggggttgactccatgtctttgtcattgtgaatagtgcagtgatgagtatgcaagtgtatgtggtttttttggtagaacaatttattttcttttgggtatatacacaggaatgggattgttgggtcaaatgatcgctctgctttaagttctttgagaaatctccagactgcttttcacagtggctagactaatttacattcccaccaacagtgtataagtgttcgcttttctctgcagcctcaccaggatctgttgttttttgactttttaataattgtcattccaactgtgtaagattgtgtctcattgtggttttgatttgcatttctctgatgactagtgatgatgagcaattttttgtaagtttgttggctgcttatatgtcttcttttgagaagtgtctgttcatgttttttgcccatttttaaatggggctgtttcttttttgcttgttcaattgtttaagttccctagagattctgcattttgttgaatgcatggtttacaaatattctctcccattctatagtttgcttgtttaatctattggtagtttcttttgctgtgcaaaatctctttagtttaattaggtaccacttgtctatttttgtttttgttgcacttgcttttggggacttagccaaaaatgctttgccacagccagtgtcaagaagagtatttcctagattgccttccaggatttttatagtttaagatcttacatttaaatctttaatctattttgaattaatttttgtatatggtgaaagataggggtccagattcaatcttctagctagcatatgactagccggttatcccagcattatttattgaatagatagtcctttccccattgcttgttttcattggccttgttgaatatcagatggttgtagggtatgcagctttatttatgagttctctcttctgttccattgatctatgtgtatatttttgtaccagtaccatgctgttatggttactataggcttacagtatggtttaaagctgggcaatatggtgcctccacctatattctttttgcttagaagcgctttggctattcaggctctttcttggttccatatgaattttagattttttttctgattctgtgaagaatgacattaaagtttaataggaatatcattgaactgtaaattgatttggacagtatgaccatttttacaatattgattcctccaatccatgaacatgagatttttttttatttgtgccacctcagcagtgtcttatagttctccttgtagagatctttcacctcaagaaaacatcagacaaatatccctcatgaacatagacacaaaattcctcaacaaaatgctagtacattgaatccagcggcacatcaaaaagttaatacaccatgatcaagtaggctttatttctgggatgcagggctggttcaacatatacaaatcaataaatgtgattcagcacataaatagaatcaaaagcaaaaagcctttattgagatatggttatctcaatagatgcagaaaaagctttcaataaaatctgacatccctccatgataaaaaccttcaacagactaggcattgaaggaacattgctcaaaataataagagccatctatgacaaacccatagcccacatcatactgaatgggcaaaagctcaaaccattctccttgagaagtgaacaagacaagaatgcccactcttacaaatcctattcaacagagtattggaagtcctagccagagcaatcaggcaagacaaagaattaaaagccatccaaataggaaaagaagaagtcaaactatctctctttgctaacgatatgattctatacctacaaaaatcataaagactctgctaaaaggcccctagaattgataaacaactttagtaaagtttcaggatgcaaacccaatgtacaaaaatcagtagcatttctatacgccagcaacacgcaggctgagagtgatatcaagagcacaatctcacttccagtcaccgtgaagaaaatgaaatacctagaaatacagctaacaaacgaggtgggccattctttgatgtttcatacaaaccactgttttaagcaaaccaccttgttgtgcaattgtgagaggaaaatgcagaaggagattggctgcaaatattaaacccagcatagttaggatttattttccttttgaatttcaagtttgaagccttgtctttgatttgcatggaaaagaaccagaaggtgctgaggggctgtggttcccaacaggattctggggcctgcagttctttccacgcagcctcagagctgagctggaagccagggggcaggcccaggaccatgtacagaggtgcacaagttaagagcacaaaggttggcaaatgcagatgagtgtccagtttaggcaattaatgaggctttggttaaagctgttctaaagctttagctgtaaatatacataaaataaagctattctataaaatttagctaaagctatagttaaactattctaaaatttatagggaaccaaaaaaagagcccgaatagccaaagcaaatctaagtaaaaggaacaaagttgggcacatcacattgccccagttcaacctatactataagactatagtaaccattaaactaaagtctcattaaactaaccattaaactacagccttttataagaaatcaatttgataaaagggaacaacataaaagtttatctcactgaaagccttgtgtaagaattcagaaattagaatcagagggaaaaattatatgcatttagctagtcaatgtcttttgattcagacaaatgtcaaggaaatctttcttcttccctgcatatttcacacttatttatgttttcccaaaaattattttggtgcagtttaactatgactattgaatatatgtgacctttctaattattaaattgctttggtagaataattttatacactgatctatggcatttctaataataaaaagcaagaaaatgcataatagctagatgtatgctagattaggaaagaaatgtgagaaaatatgtttacaaaacactgttactatagtgctgtgtccttaaatacatgttggtaggagaagcatcaaggagtccgctaaggtcacctcccaggttcccccataagacctcactctcatgcaagaatctattaacttgtgttctccattttactgtcaggtccttgagggagggattatgcccatcctgtgccaagagcatctagtttgtggcacgtgggagcacttagcaaatattttgttgaatgactaaataaggcgtttcatagctggaaacttcagaaaagggccatgtgcccaggcacagagggactggttacagaagaggtgccgtagcaaattagggtgatccagaagcttcttcccaggaaaagtcttcttgtcagggtgtcttttgggattgtattcatattggaagccctggggcagccaggttattgttcatcagttctgagcaacgtggatatgctccatatgaacatggaaggataaaaatagcatcctcctgtgcttgctgcaaaaggagcactcaagacaaatgataggcccaccagggatggctgaaaggtgcctgcatcttttaaacatctactgtggatttgaatgaaaatgcacataattataggatgagaaatttacttttgatctgggctggaaatagagtgtgactctggttgcgtgtattttttcagacaaaccctgcttgcaggcattctgcatttatctggggtttgcagaacgtttttttcctcaaggttcgtctgactgctcttgattttttcatcttttaatactgagcagatctaatttctgtacaatattgcgttcattacactgaaaattatgctatatttaatgatgcaagtaaattgaaaagtattggctaaaatctggaaacatttctctcttaaaattgctgtttccaaatgtcaactgaatttctagaattcatttaatgtccctttgtctaggttatgggagcatttccaaggtgattctcaatgtacacttttagcctcacatgaatagaaaaaaatcttattatggtgttttagaacaccagccccttaattctcccctacactcagagctacaggatataataacccaaccccacagatacagaggggcctgcctggctttaaccccagaagacatcacgtcaggttcggcagagagcaatacagaagcacttctataaaggctcttttgcagctttcatggccagtcaagagatgataaaacagaatggggaggaagtggcacccaacagggtgcagctccttcatctgcatagaataagcagagcctatttctcattcatgcgcccatgaaaatgggtgtttctgattggagagcatctcttttccagtggtaataaggggccaggactctcccacactgtcccccaccaaccaccttcagcactggcttcccagatctctgtgcagcactgcacaagccagggaagggaaagggcacgccagccttgagagaagtcgtgagtcacttcctccctcccatggtgctctagatgccagccacatggtcatgcatactaaccccaaaagaggccggcagaggtggttcatttgggtgaaccccaagtgaaatggaagtaagttttataaacagctatctagtctctaacccattccaataagccaggaaattataagtataaaaaagttaaatcctacatgactgaaagaaatgtatcctataagatcatctgttataggctctgtgcctgtctttttttctgcttagaagctgctgtatcaaaattacagaaggtctccaggtacctagtgacactctttgggcattcaagagcataactcacaccttccaaagttagattttgatcattttgcacctccatggatgggtagtgtcaaattcaggttctaacacaatcaacctttaagatcatgcagccctgtaggacagagatagccatccacaagggcttgcttctggatctcaggtggcaccactgctttctgttctgctaatgagtaaaactggctccatacaaatacatattaaatatgattcactgaaatatgaaaaatatatttcaaaaaacaaatatttaaatattcgttttttcatatataaagtttaaatgatcaaaaatgacatcaataatataaagacattggtagtgctttacttaatacgaaactctaaatcttatcaggactgtgtgcaggctaatctcaatgatctcaattatttttcttgtgcctagttttgtcactctaattccaagtcttgcttttgaagtaatataacaattttcttataaatttgttggaagtatcattttacaacccccaactggggagggcaggaaaatgccccccaaacacattcacatcctaatcctggagcctgtgaacatgccgtcctacacagcaaaagggacatggcagatgcgattacgttaacaggtcttgagatggggtgattagcctggattagccaggtgggctcaacaggagcacaatctctagtccttacaaagaggaggcaaggaggtctcagttagagagaggagatgtaacggtggaggcagaggttgagtggtgtgctttgtagatggagcaaggggacatgccccaaggaatgcaggcagctcctggaggccgaaaagataaggagacacattctcccctaaacctccagaaccagaaccagcctgaaccaatgcagctctgctaccaccttgatgtcagcctgcgagacccatctcagacttgtgacttcagaattatcagatacacttgtgttgttttaatatactaagtttggtgtaagttgttacagcagccataggagatgaaccccaacagcttcaagccagcctctctgagcacctcatggcctggctacctttttaattactctaggttaccatctgtggcagacattttcagtggccttacccagcacacttctccctttcctccaggggataaagatagtgttgtgctaaacaaatctgcgttgccagccatgtggattgcatcaatttggaaggaactttcaactcagtggtggaaaggagagggattgtttctgagaagcttttctacctcttgagacaaaaggaaagtttcgtccctttttttgcttctggatgttgtcatgtctagctgtgattcctggagcccctgcaaccattctgtgattggaaggggagctgcagaccctctgcagactacatggggaatgtctcggagcagagggtacttgatgccattgctgaaccactcagtcatccaaccagctgtagagctgctctagggacttcctgattcttgctgctgaacaagctgattaatacaactgcataggtacttgttgggcatagctttcaggccttccaggagtaaatgaggagcaggagaaaagtaattgtgaacaagagagggtgaaaggaaaaaaggttcatataaatcatagataccagaaacttcatacaatgaggaggaaaattacttccagtaacatcaatgaaataaacctttttatctatttcatggtttgtatttttatatttccttttatattctgttctttttactccactgagtgaaggagataaagtcttgttctgatgtgaaatgtaccatcagagtcacaagggcatcactggcatatgaaactatacctgtgccttacctgggcaggaaggagactgtttcactcaccttgtggatgagcatggccagtccacttctatgatacatacatatgcatacctttttatatgagaaatagatttctctagatatatagaattagccaaaattctatcgagatacagtaagttccaacataaagtttcttccagcttatgagagctgattgacacatctcttcctagtgatttcaagttggaggcttgaaatttataccacaaaaatcagcagctaccgctcatcagagctccccttcccagagccagttgttatgtcacaggaaaggggtccccttccagaccccaagagagggttcttggatctcacacaagaaagaattcagggtgagtccacagtgcaaaacaaaagtaagtttattaagaaagtacaggaataaaagaatggctactccatagacagagtagccctgagggctgcttgttgcccatttttatggttatttcttgatgatatggtatacaaggggtggactattcatgcctccccctttcagaccatatagggtaactcctgatgttgccatggcatttgtaaactgtcgtggcactggtgggaatgtagcagtgaggacgaccagaggtcactttcatcgccatcttggttttggtaggttttagccagcttctttactgcaacctgttttatcagcaaggtctttatgacttgtatcttgtgctgacctcctatctcatcctgtgacttagaatgcctgaaccatctaggaatgcagcccagtagcttcttcaagctgaataggcgcaatgatattcctgcctaacttctagggtctcttgtgttcagggtagagaggagctcagtcagaaagcatcagtatggcaagggccattcatgactcttgagttccaataagaggtgatatctggaagattaataagtactcagtttaagaaaatgttgagtaagcttattctgcattcttactcaaagagtacagcagcaatatattctacaacaataaagccaaataagtaaaattatcccaagtaaactaaattagaaggctttccatgaactaggcaactgttggaaccaagctggtagggggttgctagatcattccagtacatgcccagaattagaacactgatttagatttttacattacccatccctcttgtttcttctgagcagcagtcagagatcactggttggtttgcaggaataagcacggttagcctaaattgcaaaaacaaacttaaaaacaactgatgagactagaatctaataagaagtgtaccatagttcttacaacataacttttttgtttgcagtttcccatttttactaaagacaaatcagcaagacaaatttgctttattatacttggcctgattatttgtataaagtacaacaaggaaaattattttttacataagctctttttaaattggctttgatggaactctattccatagaagaaatcttagataagacttttttaaagctgagcccagccatgggtttctaccctcaaatacctctgagttgggtaaattcctttttctgagatcccaagataacttggggctcctggacctgttagaaagtgacattctttacttaccacaggtcagaaaccttatacagggactgtataataggcaaggtatgaggccagttttccaaacagcttttattggctctacaagtcaagtttgactccttaaacgaatgcaaactattccagtcaaagccctggtaaaataaccagtttctccaattgtgtcatgttgcaaagaaaacagattcttattgcacttatgcaaataactgtattgccataaattaagaatattcacaaatagtttccaacttctggagaaatcagatagagagaaacaaatatgctccagattttgtttacaggagtatagtttacttaattgctaaaaagctgtaaatagctcaaaagttttcttgactctgaaaagcaaaacaaaggatcagcagcattttaagcaaaaagttaaaaaatattactttagactttcattagtttagttcatgcagttaacttctgtttgatattcatgaacatttcagctctctatgagagttctgaaagttttttcctctattctaatgtcataatttccaaagttagcagaaacttgcattcaagagcacctgtcaaagccctatagctgattacaaaccacctttggaagatgatcaaaataagacaattgtttgtggatgacaaaagatgttagaacagccacagtcaaaaacacgattaacaaagaaatttggttacctttgtggcatacaataattcaacacaattataattattactgataatgtacactaagtcatatcagaattataagagttttttataattttagaagacataccaataacatttatacaaatacagcccaaagaaaaccaatcattttatatttgacagtgcttcctgtgtgacttttataccaaataagccaaatgtcactgttgcattagtgcattattgatgtcagacccaattcttagtaaaccttatagataaatatatccaatcttattcagtttgaccataaggtaagattcttataaaccttttataaccctttacaaatttttgtgaaagagcagatcataagcaggtttttgctctaagaaaaacctattatgcttttattccaatgtttagtttatggaaaagctgaaaaatgccactttaattttagtcaatgcagactctcttacaattaatttttcacaaaccttccataacttgcttaagccttcagcttcatcctaacttaaaacaatccattaatcctttaatctaggccaaaaaaattacatttccatgcctttttataatcttttaccaaaaacacatttcacttttcttatacaccttgtgtatagaactgtgtcttcactagtctcaaatacatgttatcctgttaactcttagcagcttttacttttgatgaaaaacctggttagtaagcaattttatttatgtattagatgtggggcctaggacccagacagaagtgcagataaggtctgactctctccagcgtttaacttcacatgtctcaggccttacctagaatctaatgctccaaaataaatggaacagttttcaaaagtcaaagaaacagtgtataaccttaaagcatttagtaaacttaatatttgatctgcataatgtagaccaaatatttatagttctgaagatatttttattttatgaataatctttaaaactctatttcccaaagattacttaagtcacatgaactaaataaaaggcattacactttttacttttctgacaaaatatttgatttaagtgcttattattaaaccaattaattaaagctctttcatttataaacatcatacacagaatacatataaatacatagaaagataaaagatagaggactcattttccaagccaggaattgaatcctgaacccaggccaccattgtgaaaagagaaagcatggccacatggttacaaggtcaagcccccaaggacatagaagacaagagggaaacctcatccagtgttttttcagggacctgtagcaaagtttagaactgaccagtttgctgggtcaccttgaacagcagtcttacaggtgtcctaagcccatgttctatccctagggacccctcattgtgacagaacaataaagaaagacacataaagcacaccagattggctacagcttaagactagcctcacaaatccttttttccattaatcaaactttacagaggagataaacagtgatttttaccattcattcaaccagtttgcacagagagagaaacagcggaaaagcattgcctgcagcagggtgggaaggcaaggcgctcagggaggccagagaaagacccacccattgcagcaacattgaaaagttcaggcagctgcttgtcagtagcaaagggatcttttccagcagtctcatcagctctcaagtttccccttttagggaagaaaaagctccccatgtcccacaatcccgtacatgcctaattctgtcactcacagctattagcaaagagcaaggcagattattccaaagagaatagcagttaacatcctgtagtaccaaacccgttcttagctgagagggactttaatgagagggactttaccaagaggggcctctaaacccctgaatcttagaaggcactctaaccctcctaaattgggcttctaacccaaggttggtcaagcatccgtgccttttatgaagaggggcctctaacccactcattcttaagagagactctaactcccctaagttgggcctctaattcaatcccattctttacctggctatatgcaccccacttacctgaaggccgccaatcagtgccatagtctctttcctttgggttgggggatctcctcagcatcgtcccttccatgttcaccagaaagatgtcaccagacaccaccacttacctagttagcctttgggtccctttatggtagccagaaaaatgttacagggaaggggtcctaatccagaccccaagagagggttcttggacctcgcgcaagaaagaattcagagtgagtccacagtgcaaagcaaaagcaagtttattaagaaagtaaaggaataaagaatcgctactccattgacagagcagccgtgagggctgttggttgcccatttttgtggttatttcttgatgatatgctaacaaggcgtggattattcatgcctccccctttcaaaccatatagggtaacttcctgatgttgccatggtacttgtaaactgtcatggtgctggtgggagtgtagcagtgagtatgaccagaggtcactctcatcgccatcttggttttggtgggttttagccggcttctttactgcagtctgttttatcagcaaggtgtttatgacctgtatcttgtgttgaccttctatctcatcccatgacttagaatgccttaactgggccgggcacagtggctcatgcccataaactcagcactttgggcggctgtggcaggtagatcacctaaggtcaggagttccagaccagcctggccaacatggtggaaccctgtctctactagaaatacaaaaattaggctgggcacggtggctcatgcctataatctcagcactttgggaggccaaggcaggcagatcacgaggtcaggagatcgagatcagcctggccaacatggtgaaattccgtctctactaaaaatacaaaaattagccaggtacggtggcaggtgcctgtaatccagctacttgggaggctgaggcaggagaatcacttgaacttgggaggcggaagttgcagtgagcctagatcatgccactgcactccagcctgggcgacagagtaagactccatgtcaaaaaataataataatacaaaaatgagccaggcatggtggtgtgtgcctgtaatcctagctacttgggaggctgaggcaggagaatcacttgaactcgggaggtggaggtgagccgagatcatgccattgcactccagcctgggtgacaagagtgagactctgtctcaaaaaaaaaaaaaaaaaaaaaacaaagaatgccttaaccgcctgggaatgcagcccagtaggtctcagcctcattttacccagctcctattcaagatggagttgctctggttcaaacgcctctgacagttacacatttgccagtacaccactgggaacaatgaaaggaaatacttggtttctactctcatcgatgattttaactttaataacttttggtattgccttatttctaatcaaaatgtaatgacatgactaatattttaatttgctaagtcagtctgctcagatctgctgaattgatctgctcaaattaattgctaatgctaatagtatgttgcaagactgaaggtttaaccacttgaagcatgcaaacttattttgtggatttttaaaacttattttatctctctatatgttaaaactatatagactatcagaaattggcattagggaattatttagctctctcattttccatagttccaggccttataaagagccacactgtgagtacagacagtactgaatctgactcacagccgcattctggaaactgctaggctgcatattgtggatcataacacataaccctggaatgaggccagatctaataaaactaataagctgcgccttgtttgacacatttcatgaattgaaagtgcaggagcctaaatgaaatcaaaggcccctttcagttggcaaagaacaatgagcctaaataagttaggattgatgagtgggcaattcaatcacctcctgcctttgggcgagtcattttaccctaaatgggatgctggttctcacttgtgaatcaaaaggggattgaaatgagggatttaaagtcacacaaaatgacttgttatcccagatgactaaagccaggaggtctgaaaccaacacttgcttgatgtgttttgcagaaatttccacacactaaagtagaggacacttgatccagagagggtggagtgaattaactaaagagcaatttatttactcttttatttatccatccatccatccatccacctatccatccagctatccatccatccatccatccatccatccatccatccatccatccatccatccatccattcacccaggtctctgtgacagaccctgagccatgctaagttctgggccagatataaagcagaaataaagaaagatagacctaacgagagaggcgaattgtaaacaagtgtgtgtgtgcatgcatgtgtgtacatgtgcctatatgtggtgttgggaacaaatgcctcaatgtgcaaaacactgtaaccctctttgtcatccgtaactgttctcttcttgctttggagattgcatctccactcatgaaatctgggagtggcagaagagaaggaggcatctgaagcccgtccgagggtctcagggcttcacttcccttactcccttctctccccagttgacatcacctgggtgtcagcagacgcttagttggcttctgatgcagagcagagtgtctgcaatctgcctcacgttgtcctctcttctcactcctacaaatgttcggctgagctccaaggtcctcttcacctggcccttggctgtgggcctcctcattgtataccttcttgaggttgccatggttagaacctgtctttggtctgttctcttagcattcatagcacctgctgactgttgcaggtttgtgggtgctggctgactcccaaagctcagctcacaccagtgctcctgagctgcatctgccatcctttccctggctttgagctggtcactgtcaggctctgctgtgacctgaaacttcttcggcccatgccctgagaaacaaagtacagcagggaacaactatcctctcgcaacatactcgggcaccccaggatttccctcagtcgtctccggttacctacagcacagacgcatgtgcacatgcatgcacacacacacacagtttccaccctggaggggagggtctgggactgtactgctggccgcttgctctccactcaccctgtctctcctgcctctgctgccccttcctgtctgggaggcactccctctggcttccctactccaactaggaagacaaaggaagatttactgaataggtaaatatttgggtacccacttaatgattattcatgtaattataatatactacttctaatgcttttatagtaaagtggcaataataatgattagcaagtaccaggcagtgttctagatggtttacatgaattaactaatacattatttaccataggcagctgatgtatgtactgttatcatttccattttaatgaggagactgaggtgagttgcccaaggtcctatcactaatttgtggcagaggctggggcaggatttggacttaggctccaacatgtacaccttaaccactattatgtggaaaggatgcagtatgatttcataaagaataaaaagatgaacatcaaaatggaaaaactggagaagtactccaggcatacagaagagcaggacacatctagcaaatatttggtgtatttggaactgaagatgtgagggtgaaatgttagaatgtgaagctggaaagaaaatggggacagattctggaaaacggagtacaacacagtgaagcgttgaggatagaccctgcacacagccagtgaagggcctttggtagatgagtgacatggacaaagtatttttagaagggagtgtctggctgcaacctgaagaatgagccagagaggagagagactgctatccagaggtcatttgagaactggctcattggttaattaagtcaacaaatatgaggtggcctctgtctcatgaattggtatgaaatgttatagagcaaaaaagaatggatggaatatgccatccagggctcacaagttagtgagggtgacagaatataaacaaatacataagcataataaatgccctcatagatctctacgcaacaggcactgctgttacagagggtttaattctccctagagaggacaggaagggctctctgagctgggtgcaaaggcatatcctatgggaataggaaacacatagaacacagttacatgactttaggtttacaattccataaaattgtgtgtttcaggtgcctgttatactactagtcctgaatagaaatgaaatattttatgagtttgcatataaaatatcctagttaactgatatggtttagatctatgtccccactcaaatctcaactcaaactgttatccctgtgtgtcgagggagggacctggtggaagatgattggatcatgagggcagtttaccccgtgctattctcataatagagaaggagttctcacgagatttgatggtttattgagattttatggtttaaaagtggcagtttcccctgcactctctctctcctgctgccaagtaagatgtgccttgctcccccttcagcttccaccatgattgtaagtttcctgaggccttcccagtgatggagaactgtgagtcaattaaacctctttccttcataaattacccagcctcaagtagtatctttatagcagtgtgagaacaaactaatacagaaaattggtaccagcagagtggggtactgctataaagataacctgaaaatatggaagtgactttggaactggaaaacaggcagagattcaaacagtttggaggactcagaagaagagaggaaaatgtgggaaagtttggaacttcctagagacttgttgaatggttttgaccaaaatgctgatagtgatatggacaatgaagtccaggctgaggtggtcacagatggagatgaagaatttattgggaactgaagcaaaggtcactcttgctatgctttagcagagagactggcagcattttgcccctgcccttgagatctgtggaactttgaacttgagagagatgatttagggcatctggcagaagaaatttctaagcagcaaagcattcaagatgtggcctggctttttctgaaagcattcagttatatgtgttcacaaagagatggtttgatattggaacttatgtttaaaagggaaccagagcagaaaagtttggaaaatttgcagcctgaccatgtagtagaaaagaacaacccatcttctggtgaggaactcaagctggctgcagaaatgtgcataagtaatgagatgccaaatgttaatagcaaagacaatggagaaaatgtctccaggacatgtcagagatcttcatggcagcccttcccatcacaggccttgaggtctaggagggaaaatagtttcgtgggctgggcctagggccccactgctctgagcggccccaggatatggcatcctgcatcccagctacttcagctccggctgtggctaaaaggtgacaaggtacagatcaggccattgcctcaaagtgtgtgagccccaagcattggcagtttccacaaggttttgggcccgcaggtgcacagaagacaagagttgaggtttgggagcctctgcctagatttcagaggctgtatggaaacatctggatatccaggcagatgtctgctgcaagggcagagccctcatggagaatttctgctaaggcagtgcagaagggaaatgtggcattggagcccccatacagagtccccactggggcactgcctagtggagttgtcaggaaagggcaactgttctccaggcaccagaaaaatagatcaactgacagcttgtgccatgtgcctggaaaagccacagccattcaaggccagcccgtgaaagcagatgcaggaagtgtaccctgcagagtcacaggggtggagctgcctaaggccatgggagcccacctctttcatcagcatgccctggatgtaaaatatggagtcaaaggagattttggagctttaaaatctaatgactgcccagccagttttcagactttcatggggcctgtggctcctttgttttggctaatttctcctatttggaatgggaacatttacccaatgcctgtacccccattgtatcttgaaagtaactaagttgttttttatcttacaggctcataggtggaaggtacttgccttttttcagatgagactttggacttggacttttgagttaatgctggaatttagttaagactttaggggactgttgataaggcatgattagttttgaaatgtgaaaaggacatgagatttgggaggggccggggcagaataatatggttcggctctgtgtcctcacccaaatcttatctcaaattataatccccatacatcagccgggtgcagtggctcatgcctgtaatcccagcactttgagaggccaaggcgggcggatcacgaggtcaggagattgagaccatcccagctaacatggtgaaaccccgtctctactaaaaatacaaaaaattagctgggcgtggtggcgggcgcctgtagtcccagctacttgggagggtgaggcaggagaatggcgtgaacctgggaggcggagcttgcagtgaaccgagatcgtgccactgcactccagcctgggtgacagagcaagactctgtctcaaaaaaaaataaaaataaaaaataatccccatacatcaagggagggacctggtgggaggtgattggatcatgggaccagtttctcccatgctgttctcatgataatgagggagttctcatgagatttgatggtttacaagtgcagtttcctctgcgctgtctctctccagccaccatgtaagacacgccttgcttccccttagccttctgccatgattgctagtttcctgagtcctccccagtcatgtggaactgtgagtcagttaaatctctttccttcgtaaattacccagtctcaagtagtattttatagcagtgtaagaatggactaatgcattgaccatgttcattgtgcaatgaaatgggtattcagcaaccatatactcgagtattttattaactcccaaacgaagacagaataatccacatattcagcagcttgattaagactcataggaggcaggggattttaagtagcaaatcaagcactgccctgtcttcacagacatgcaaacatattctgttttgttttgttttgttttgtttgagttggagttttgcttttgttgcccaggctggagtgcaatggcatgatctcagctcactgcaacttccgcctcccgggttcaagcgattctcctgcctcagcctcctgagtagctggaataacaggcatgcaccaccacgcctggctaattttgtatttttagtagagacggggtttctccatgttggtcaggctggtctcaaactcctgacctcaggtgatctgcccacctcagcttcccaaagtgctgggattacaggcttgagccatgcgcctggccacacatattgcagctggaacgtggtggcatagcagtctctatgtaagtggccatggaagatcacaacaaagggcagcagggcacaaagtccagagagccaggagcaaggggaattggtgatgctagaaatttagagctggaaagagcagaaaaaagagcatcctaaatagcgatgcttggtcttctccagcagtcatggaggagtcagggttcactgtgagaagagagacaccatttccacaaattgtctaatgagaatctggagaatgaccctcttattctctgtggatttgaattttctctgtaggcttcaatgagttaaagaaaatactcttcaaactacatactaagaagttcagtctttcttatggcaaataaagaaaacctagtaactttttaaaactctactttattattatgacttgagatgtttgtttctaaaattacaacccagtggactggctgtacatttttctatgtcatttgtatacaatctaaaaggtctaaataacttgattgtgaatactgtgtttgctgtaaaaaaaaaaaaaagagagagagaaaaaaaggcacacttagatgagtggcctacgggtaaactatgaaagcagagattctactacacagataataatttttcattaaaaacttgtcaaggtttagttgataaatgtgattatcaataaattttacatcctgttatttaatcagcttatatatgtatctacagtcattgcataaacatggaattgtctgtacccaaaatgcatttagaagtacattattgtaatacaaaagaagtttccagtcttttatgttcttatcccctagatttattattatacgcaaacccaaaaagaaggtgtcactttctggaaacgtattctgacctattttgaagtaccctgaatggctggcagacattgctccatgtgcagttttaacctgcgagctctctgggctgtgtgtgctgtgtccttcacgaatgacttctgttcttcaatcactgtaaacaaagtgacaggagcaccaagagagtttaagaaagaaaatgttggcatacaaaaagaatttttttctatacaaagtaaaatttaaagaatacagtgagccagacacagtggctcacgcctgtaaacccagcattttgggatgctagtgagggcagatcattttgaggtcaggagtttgagaccaacctggccaacatgacaaaaccccatctctaccaaaaatacaaaaactaggtgggcatggtggtgagcctgtagtcaactacttggggggctgaggcaggagaactgcttgaacccaggaggcggagcttgcagtgagccgagatcgcaccactgcactccagcctgggtgacagagcaagactccgtctaaaaaaaaaaaatcatcagttcgagactatagcagaagttcaagtatgaagccacaggggtctgaatggtggtattgacctacaaggcaggctgaaaatgacaggagaaggaattatatgtgaagaaataatggaagaatactttccagaactggctgatgaactgaacatggagaataacacgagggaatatgtgttttggctataggtttccagcatttgggacagtagaacgacatggacattgtcggaatcagagagcttgtgcggaggccaggattataggccgtaagttctgtttgagatgcagtttatgaggcctctaagtggatgtgcccaaagatttcagatacacgttctgggttttggaagagtcagaagtggcgaggcacattgcagagtcatttggataaagaccataggtagcatgagcgggtaaagcaaggaggtccttgagggaaactttgagggctgtcctcagttagagaacaggaagaggaagacctgggagtcagggagctcagagaatcacgcaagataacagggtgttcatgagctttgcactaagaaaaaataagggttggatgttcagcttgcctataatatgggaaacagatgacttttttttttttttttgagacagggtctcactctgtcacccaggctggagtgcagtggcacgatcacggttcactgaagccttggctcctgggttcatgcgatcctcccacctcagcctcctgagtagctgggaccacaggtgcatatcaccaggcccgtctgatttttaaatttttttgtagagaagggttctccctgtttcccaggctggtctctaattcctgggctcaagcaatcctcctgccttggccttccaaattgttggaattacagacatgaatcatagcacctggctgacaattattaaaactacaaaaacctgatagagtatatgcaatcaggtccataaattatgaaacacaagttgtgatgctagttgtttagtgtcaatataaaaattcttaaaaaaatgtgatggaagtatttacaaaggaacttgaactagcttatgaagagagacttatcatcgtcacttacaaagaccacactcctctctcacaaatactctagtcccgcgggctacgagtgtgctggcaaaccctcaggtcggtgagtcccactctttgtgagttcgcctggagagcaacatggggagagcgggagaggtgtcatgagcaggtgaggagccctgggaagaccctgttgttaaaaatgtcatcatggatttatccattaaggtttttatttcatttctttttagaaacaaaataccttttggaacgtttcagcttacaagctgtttgtatcttgcagtataactataattagataatctggttgctcctctccaatgaatgaaagcattcagctgtttaactgggtaaagtgaaaagaaaggagaggtaattttggtgcctggagtatctcaaggaggtaggcgtggagggagcagccgttgcgaaggttttggggagatgccagcaactctgttgcccatcttttggtgtgtgtagggaaggtgccaaggtgtgttgtgggttctcaggaagggggaggtacctggagggtggcaagggcactggctcaggtcttccctcctctgtggccagcagaggggcacgagggagccacccagcccctctgggcttctgccttctcacctgtagatagggcaacaaccacacccacctcacaggaatagagaaagctaggaacagtgcctgggtaacaggagggaatcaatgaatgtaagccatgaacaactgcaaagaaaccctctgttatttctattatttgagttacctgcctcatcctcccattcttctgcctcaggctcccaagtagctgggattacaggcgcccgtcaacacgcccggctaattttttatatttttagtagagatgggtttcaccatgttagccaggatggtcttgatctcctgacctcttgatccacccaccttggcctcccaaagtgctgggattacaggtgtgagctactgcgcccagctttttttttttttttttttgagatggagtctcgctctgtcccccaggctggagtacagtggcatgatctctggtcactgcaacctccgcctcccaggttcaagcgattctcctgcctcagcctcccgagtagctgggactacaggcgtgcgctaccacgcctttttgtatttttagtagagacggggtttcaccatgttggccagtatggtctcgatctcttgacctcatgatccacccgcctcagcctcccaaactgctgggattacaggtgtgaggcaccgtgcccggcccaaactgatgattctaccccaagatgttcactcctatacgttgatcttcccaggtcagcctgcacttcagactatacttaccaaattgttattcaatcatctctatttcccttgatgcctaaagtgtccagtccagactcagcctgcagagagggctccctcctggctccctgatatcacctgccagttcattccaactcaggccaccttaaccctaacaacgagccactgtatcttgactatgctgtgctcccctctgtgccatcactcagggggtatcctctgcccagaacactcacccctcctcatctcacagggctcatcaaagtccccccatcccaatgaaacattttcctgactccagcccataatgatctctcctttctcttaaccagagcttttttccacgtagccttggtatgtacccttcatttggtacttaatcacttgaaatcttacttaactttttgtgattgtatgattgtcctcttcagagaatagaaagggaattaatatcatttagcacatgctaaatggtatcatttcatccttataataaccccaggaattaggtatcattttgcaaatgatgaactaataatgcccagaggagctccgttacatttccaccagtcacagcatttgaaaactggtggatttcactacataccagtgatggctttgaacccgggggtgcctgattccacacccaggctgctctccacgaagacagagtgtcattgattcattctttcgacaagctgatcatactaaaatatgaatccaaggaaataagttatatttctctaacacactttcctttttttttcctacccactaactggccccatctctccctaacatttagcacaatgctataactattgtagctattcagtatatatattttttgctttagcaaaatttgattaagaaatataaagcatcctcagtataaagagctttaacaaattggaacaaatctctgaaaaatatatgcatagcaaaattgtatgctgatgtaagagacaacagtgccactatcataacaatttcttcttaaaattgcctcctggcattaacttcacctgaaataatcctttcctgacctatttaattctacttatttggtcgagtgtattaaaattcgcagtacattatcttattcaaggagagtttttgtaaaatagggccatgttttacaattaataccagtggtgaaagccacaaataatctgtttctaacagtctcaatttctaaaactctgccaagacttttcaggcctatcatatatttcttgattcgttatttatgaacacctgttatcctgaagtacagttattctccctctacctctgaccaaagtatactatttttagcattatacagatatgtgatcaaggaaagagaagctttgacaatgtatttcaatatgtattttactcctttttatctccctatggttaaaataaatgcagtttttaaagttttaggaaattcctttaactatatgacaagaggttgagtgggaatgttagaagctatgaaacaagggattatttctttcttatttattacacttgaaagtatcattctttgactgttaccgtcgggaacatacaattcctggataataaaggttaagtgtgcataaatttgagatctgcttacaactgacctttagctgtcttttagcctttttgacagaaacttaaaataaggttattccataaaataatttgattctccattctcaaatccagatttgttactcagtaattaatatcttccagctagacagagccatcagcatttgtagtaaaacagccagccatagacatgatgattaatttgggcagaatcatcacccatctaagttttagtctacccaaccataagcaaaatcaatatatgcatttattcataaaaaattatttctgtcttccgtttatatttgtcaatcatcttttgtaattgtctccataaggtcttacatagtgattgttaattttattatcttaaagtgtttgttttacttcatctcttgctattgtgaacttttaaaaaatattttcaaagttgtttttaatcgtgtatggaaatgctattatttttagtgcattgatttttttatgcaacaatgtttttacagagcttttaattgagcatgtctatagactctcagggtgtgctgtgtagacagccatatcatcctcaaatataaacagttcttttttttcccttccaatctttgcatgtacttttcttgtgttaccacattagctagaacctccagcgtagggttgaataaaaataataactttcttcttatctcctttctaaccaaaatgggaataatcctaaagttcaccatgaagtatgggatctgctataggtttctgctaagcgtttttattttttagtgaagaaattttatcaaaagttttatctgcatctattaaaattatcttatttgtcttcctttaatctaaaaatgtaaacatgatgttgaaaaattctggcatttctgtgatatggcctatttggccatcattcaatgtgcctatttgtttggatttcagtgagattgaactctatggtttcagtgttaaggttatgtcggcctcggtgagattgaactctgtggttttcgtattaaggttatgttggcctcagacagtcagctgtgtagcttttcctcttttcgattcttaaaaagagtcagtacaaaggggaaattttctactatttggaggttaagtaatttcattaggattcaattcctaatgtgttgttctttctataatggttttctcttgatcgctgggtgattttaaagtgttcttaaatttccaaatatatgggggtgttaaaagtttggctatcttttagttaatgatttgttattttatttaactttctgcagaaaatgtgacatgtatgacatagacatagatactttggaatttctgaaggcttgctttctggcttagtgcttattcagctttccaaaatagtccttatatgcttgtaaagaatgtgttttatctaactgttgaatgcaaggttctatgtaggtccattgagtcaaacttacatgtaaaatttatgtgtaaactttatatgaaaaagtaagcaaattatggtaataataataataaacctaggaaagtaatgtaaagggaccagcctaccaaatattaaaatcatttaaacagtcgtgataatcagatcaaaatgatactgttcacaaataaggaagacaggccagtgaaacagaatagaaagtcaagaaatagaaatttataataaggttaaatctccaatcactggagaactagtcaataaatacaataggacaactggatatgacctaaaaacaatccacagttggaaacttaccttacattttataccaggaaaagttacaaatagactagtgatttaaatgtaaagaaaataaatcataaaagtatgagaataaaccattattaatgctcttttctgactgtttctattctttatgctacacaatgggggaaatattcccaatgagactcaaaaatcagcatctataaaacattaacgaattcaaaaacatttttaaattgtcatggcaaaagaaaaaattgaaactcctatcacactcaagactaatttctctaatataaaagatctcttgaaataggccaatgcctcagtagagaaaaaatggcaaaagataagaaaatacaattctcagaaaaggatatacaaatgaccttcaaaaatagctttaaaaggtaattattctcatagtaagagaaataaaacaaccctgaaataccatttttaactataatattgttaaaaatcaaactctgatagcattctctttggacagacattagaaaaacaggtagtcatttattttttatagaaatgtaatttggtaccatctctgtgaagcacgacttggcaatatgtatcaaaatgaccaatatgtatacccattgataaaacagttcctcttccaggaatttatcctacaagatactttttttttaaaacttcacctttattttccacctttcattgtcattatattttgagtgttcactttataaactaattcagaactgaaggacattttcccttttatgataatctcttttaataagagaatttaattcacaaacactttttattattgcttacatatttggatccattctacgtaagtttttctctccatattttttcctgggaccaggaggatatttacccagccttcaagataaagctggtactgtttttttcattccctcttctctattctcttgaaagttcattttatttttcagaataggtattcttaaactttaatatgcttaattatttgataagtctaaagggtatcaataactttatcctcatctctttcaaggcagagatattacctttgacccagattaccttcctctcatcttccttgctattcctttctagtatcttagccccgctttataaacccgccatattgatgatttaaaaaactcataatagtcactgcttatttagtcttaattcattcaacaatttatctactattagctctttcatctcatctctttgtcctgtgttcaactcactttttaataaattttatcctttggtaaagttgatgatccaggggttaaaaaaatacccttcagtcttagtcaaatacatttgatttgtctttatttttgaatgataattttactaagttgtattgtagatgaataacttttgttctttgagcatgttgaacattttttacccttttctctgacctctattttattaatgagacatgtaatttccatctaatttggatcttttattgtaaactgtcttttgtttctagttgcttttaatcttttccttgactttggagtttcatagtgtttctgaaaagtgtctagatctgcattttccctctgaatatttacatctttcttaattatgaaaaattcccagtcattgttgcttcaaatattgcctttccccatgatctgtcctttcctctggagctcctgtgagtgactcgagggagcatcccgggtcttgggactccctgcgatcttttccattgctttacctccctgtgctgcctctgcattcatcttccagctccgtgatccagatctctaattctcttttcatttgtggtgaatttattgttcaacctagctactgaatttttaagttaatgatactatattttttctaaaagttatattttttaagtgaaatatttttccatgttaagtatttttaaattatttatcttgagattttattcttctgtttccagttgttacctccacagctcgtgtctatgctcattggtctgttgagtcttccttttggtgactgcattgccacagtggtggataatttttcattgcgagctcatctatattaggggttgcattttctgtgagtcccatgtacgagattatgcaagtgttcatgtttttacatttgctttggcccgggccccaagggtttccttttcattatctgagactaatgctttcccttaatttctgggcttttgatttcctaggtttccatttctcagaggaggtttgtcccaccgagagctttgtcaaacaccaggctgtctttctgtttccacagacagatttgaagagatttttccagtttctttttcacaggtgaggcagcccttcaagtgtcctggttgtatgcgggagtctcggattagttcccttctctcaccaaatgctctgtttttctgaagacattaaaaccttattcctagttttgtgacctaatctgatacttcctggggtctcctggcatcacctggaactcacttctgcaactggattttgtctttatctctagcatctgaggatttcctgagctcagctttgcattgggcatattttgttttttaagtctgtagcagttgatggatgaatccgtttcagtcttgtctgccatcttgcctgaaatttgcttcatttctgcccttaagagcatttttcatgttaaaaagtcttaattttagcattaagaatctcatgtgctatattacatgattttagttgtatattcagtatcactggaaaatataaggtgagaaattatttttagttattcatcacaactgcatcacacgtatttgaaaaataatagtacatctacttgtaaaatatattatatatattttctgtagacagtgattaatgcctgtctaatttgtaagacctcttgtaataactcaatagctgcctcaagggttgagaaacactgttaagtctttattttagaaacgtcacaataagtctaaaggaggtcataatatattaatagataattatactttttcagattaatttgtgtttctgagcaagatccttggtaattataacagcagtcataagaacagatattttcaatgaaattttaattgctaatagaagcaaggatatggaaagcataagagtaagtctctgatttgagtttttttcatgaaagtcattaacctctgatgtggtttggctttgtgcccccacccaaatctcatctcgaattgtaaactccacatgtcgagggaggaacctggtgggaggtgattggatcatgggggtggttttccccatgctattcttctgatagtgagtgaattctccttggccttccaccatgattataagtttcctgaggcctccccagccatgcagaaatgtgagtcaattaaacctctttcatttataaattacccagcctcagatgtttctttatagtaatgtgaaaacggactaatacaacctcactgtgtttctgatgtttcaatatagtatcactgtcttacacatttgttatggggataaatatttgacaggctaggtcaagttagaattttattgctgctgaccaaaggtcattgtaagatttaaaggtcacatagtaggtactatgtgatctttaaaaagttataaaacatgaattttaaagatatattttatgagtaaaaacgcttcacatttctggagctaatatcaatgtaatccaggtattcacatataattttaactgatatgtctaaaacattccttgttctgtgtccctctgaaagcaattttcttttaattctggatttcttaaactttaaagaaagattcctaaatttgaaaactactattttatgttaaataaactagttatcctaagaatgaaaaatttactgaaataccttaactgaaataaggtttgttgtcacataaaccttaaaaatgactatttgtgaatctaaattaacaaaaggagccagcaattgagaagaactcttaggaatagcagtcacagtgtgacagacacacacatacatatagataagggatttcctcatttatctcttcttcaaattttggctttaatcttaaattattctcagtatctttttttaaataaggacctcttattgttatttatatggacagattttaatatgtttgcatttgatgatactgtaaaaaacagaactgttgccagagttttaaaagtaaagggaattttttaaatgtacaactattagatatcaattttaaaactaccaaaaaactcagaatagccaattaaaccctaaatgatttctagtgaaatgagggaaaacacaagcacccggaagcctatcttgtctattataatagtcataaaatttctgaaatgtaaataatcactgcaatgctaataagagaaaaatagtattttatttacagaatacataaagttgtagaatacataaatttatagaaacttacatactccttcacctacagagtcagtgttaaacagccgaccctcggtgcagctgccctccctctatcctaggcacagccactcatcatctggtcattgttccttagcaggacagccctctcaaggaagttaacacagggcagattcaaaaggtcagaattaaaattcaatgcatgcctactgaatacctacctattgtgtgcccagcactcttctaggcaatgacaagctccctaaaaaaaagaacttaagaaactgtaatgaataaatgatgaggctacaaaaaaatcaaacagggtgatagacaatagtaggacggcctcacagaactgaaattgagatgaaaggacttgccagtgagaggtctggagaggagaacggtgtgcagtggactgaatcgtgccccaccgctcccctccaattcattatgttgggcaaatcccagcgtgaccgtatttggagatggggcctgtatggaggtaataaacgtgaagtgagatcataatggtggggccttaacccagtaggcccattgtctttataagaagagaaagaccagcgatctctccgcatgcacacagaggaagggccctgtgaggacattttgagaaggtgactgtctacaagccaggaagcgatctctccctccacagaactcgaatatgctgacaccctgatctccaacttccagcctccagaactgtgggaaaatacatgtgtgtttttcaagccaccttgtccatggtattttgttaaggcagcctgggctaagacagtgcgttcgaagagtccctaaggaggaactgctgcgggacttttccttagttcggctgaagacagggttttttgtcccatggccacgaaaattcatgctcacagacaatttgaatttgaatgagtaagacagggttttgttgggtgaaaaaggaagaaaaaggggaaacagggactctcgctaagccagagtccctgctagggtgcttcccaccagccatcctcatcccattttggggcttcccaccagccattcgcatcccagtttccacacaggaagaggaggggccaggctactccctgcggcaaatggtgtgaacctgtgtggctcctcccagtgggcaggaaagatggagagggtggaccttctccaaggaccgcctcccccctggctgtctcagaaccagcgaggtcaggccaggccagggattggagggagggaattagggtgacctgccagtgttgggggtacaacttcaccaggtcaattgtgctgtgctgaggagaacagaaaggagattcaaggattagacacaaagaaagtcactggtgaccttgataaaagcaacttcagtgaaatggtgagggagtgggttaaagagggaacgggaatgaggaagcaaggacagtgatgataaagaattctcttgaaaaactttactatgaagaataatgtggaaatggagcggggaccggggacagtgtggaaatggagccgtgactggggatagtgtggaaatggagcagtggcttttcagaaaaagtacttaaagagaagtcagatatattattaagacacacacatgcacacatatccaggtgtgcacacacacatgcacacacacacgcacacacacgcacacatatacacacatgcactcacatatatacacacgtgcacacacacgcaaacaagcgcctgaggataaacgtaatataagagggattaccaaagcctaggccaaattcatccactgaaaacaaaattattataataaaaaggaaccctggaagatatgtaaaaggaatttacatacaaaaaatcatcctgtaggaagtagaactgtatctactgtgttaaaaaagtttgtgtctcaaaatataatggcaaattgttattctattattttgttgttatttgttttttattgttttattttttctttggcatttttatcattgtaaaatacacataaaacttaccatttttaccatttttaagtgtacacttcagtggcagtaagtactctcatacagtgtgaccatgaccaccatctagttccagaactttttcatcaccccacatggaaaccccatgcccaataagcagccacttcccagaatcctttcccccagctcttaagcagccactttctgtctcttggatttgtctattccgaacgtttcatagaaatggaatcgtacagtatgtggtcttttgtgactgtcctccttcgcttaggaaaatgttttcaaggttcattcatgttgtgtcatgtatcagatgctccacatcctacttgttaggaaaatgaaaatctaaaccacaggaaataccatttcacacacattagcatggccacaatgaagactacagaaaataacaagtgttgacgagaatgtggagtgactggagccctcatacatggctggtgggaatataaaatggtacagctattctggaaagcagtttggcagtttcccatacaacacagcatttgcactcctaggtatatattcaaaggaattgaaaccaggtgttcaaacaaaaacttgtccagtaatattcatagcagcattattcacaataaccaaatggcagaagcaacccaaatgtccatctgcgaattagtggagaaatgaaatgtgttaagtgcattcaatagaacattattcagccattgtttcattgtgggcaggtctgtgtcaacctacccctaagttggaggaagctgagagactaaagaaagagacatacaaatctagttgcttagaaaagaaacttttaacagggacttataaacagaagccatgtctgtgtccctggcagtgatgagatgatatggtagatcctgaaccattaccccccagaagcaggacttatgtgctgtcagggaggggtacacacacttcagaaggagtggtcatgaatttgccctcacggtgggatttatggtaagtaggtgctcttatacgaggaggaatagataaactgaaaatctcagaggcattcccggaactgaggttaatcagaagccaacatggcagattagcacccaggatggagttgctttggcttccatgctccacccctctaatgcagctcttacagtctctcacgccctcctcttccatgaccatccctgagccttagagagagcgcttgatgttgtcaaactttagcagcagtgctttggcaatggaaaatagatcaggcccagtgggattcctaatgagggaggttcacaggctgttgaagcacctctagtcttcagaatacaatgacctcggttttctcaggagtaaaacagcgtgagatatataacattaataatttgcactcaaggattacagtcaaaagagaatttgtatcccagaacaacaacaaaaaagtacctattccattaaagagccaactaaaagtatcatgaagaaaattaaaacctggttcctctttagacttgcagacagcaaataattcaggatttagcccaaattgtaggtaaataataaaaactcaaaaacaatggtgagggctagtatccaaattttttggtctctagtttccccgtttctgccaaggataaatcataataggaccaatttattttcaaaataaattttggtctcattatacttggcctggttatttgcataaaatatggcaagaatagtgatcagcctgagctgcttatttattttttttccagacagagtctcactctgtcacccaggctagagtgcagttgcgcaatcttggctcactacagcctggacctcctgagctcaagcaatcctcccatctcagcctcccaaatagctgggaccacaggtgtgtgccacaactctggctcattttttattttttgtagagacagggtctcaatatgttgtccagactggtaggctctttttaagttgtctttgctggaacttttatgagaaattgtggattctgctttttaaaagcctcaaggctaggagccaagccaaggattcaccattagactatgcttgtaatacctatacaaattcctctcttcttgaattcccaaaatatcttaaggttcccaggcctgttagtaaatgacattctttacttaccataggtcagaaaccttgtaagagaaccatttagacaaggtactaggccagtctttcctagaaagaatttataaagtcaacctccattcctcagtctggtcaattctgaaaatatgccattccagtcaatgccttggtaaaataaccaatttctccaattatgccctgttagaaaagaaaacagattcttactgaacttatgcaaataaatatattgctatcagataaaaatactcataaatggtttccaaatttagggtaactcaggtagagagaagggtaaattttgttcacaaaattatactttacccaacctctaagctataaacagttcaaaagaaaaagaattttcttgactcttcatcaatcagagtggcagccttctaagcaggattacgtacatccaccttggaactgccatccacaagccctgcagctctttgtccgtcaggtgagagctgcctattgggcaccgtagaatccagcagctccttacacagttccagaatcagtcgaacaaaagccatatctgtgtctctggtggcagtgagacgaggtgtttgatccctacctgttgttctaatagtaaggcaacatatttgcaatgacaacagatatttgcaaataatgtacaaacaggtcataaaaagaactaatgaaggctggccgtggttcctcatgcctgtaatcccatcactttgggaggccgaggtgggtggatcacctaaggccaggtgatctctaataaaaaaaaaaatctctacttaaaaaaatacgaaattaaggccaggcgctgtggctcacgcctgtaatcccagcactttgggaggccaaggcgagcggatcatgaggtcaggagatcgagaccctcctggctaacacggtgaaaccccgtctctactaaacaaaatacaaaaaatttagccaggcgtggtggcaggcacctgtggtcccagctactcgggaggctgaggtgggagaatcgcgtgaacccgggaggcagagcttgcagtgagccgagctcgcaccactgcactccagcctgggcgacagagcgagactccgtctcaaaaaacaaacaaacaaacaaaaaacaaaattaactgggtgtgttggtgcgtgcctgtaatcccagctactcaggaggctgaggcaggagaatcgcttgaacccgggaggcagaggttgcagtgagccgagatcgcaccactgccctccaggctgggcaacaagagcaaaactccatctcaaaaaaaaaaaaaaaagttaaaaaaaaagaactaaacagaagataattttttgtaggaaagaactgctgtggtcagtgatcttggaggatatgaagatgtagagataatttcttttctctttctcaatctctctcactcgctcaatctttcatttgacttttgtctttcaattgctccgtcttttttctcttttctcataacttttgtttttcaaaattttgagaataggaattatgcaggtactcagtatttattgtttgaaggcacattataaaagaaaagtgggaaaaacaaatctgtaagttacttcagagagacacttaaaatctaatgtcagaggaaggaagaaagcagcaggatagaaaagatgtgataaataaaccagttatagcaataataatattatattagaatcagacaaactgcatcaataatgataaagaggataaggacataagggtaaattcaacaatttaccaggaggttataataatgctgaacctcagtgtgccaaacaacaaagcctgagaggcagtgccgtgtcatatagccagactgcttgggcttgaaacctaattccagcactgactagctgcagaccttaggcaagttattaaatctctctctgtttcaatttcctcatattgaaaattaggatattaataatgcctacttcttccagtcgcttgaggatcaaatgaactagcacagtgttcacaacagtgtctggcatcacaaacattggtgttattattgttgctgttgttgatattagtattattgccccaaaacatataaagaaaaaatagaattccaaggaaaaatagacatgtcaacagtcttagtagaagacttttaactttatttatctctcactaagataaatttaagtttggaaatgtttaaggtagctgcaataaaatgtttgaacaggatgtcttagcttaaagtcattacaaaaaagtaaatagaacatagtgtacataacaaaactacaaaatacaaagaaaaaagtaaataaaaaacaacaaccgaagaccaaaaaataagatgacagaagttaaatgagaccataaatgtcaatgacttaatgtattaaaatacaacatcttaggccatagtaaaatacaaaatttaattttgtgcttacaagaaacacttgtaaaagtgtgacaataagctaaaagaattagcaaaacataccaaaaatgttttaaaaatatagtatagatgacatttttattatgaaattagtatacaatgtaaaattatccataaaaacattgggcctttaggacctaagaaaaaataattatttcaaattgtacaaaataatgttttaaaacatttccaaatgcacataaatctctgagaaaatatatattccataaatgtatgctgaataacataaattttataaatataaaaggaaagtaaagtaaaactgatgtctgtataaacctacattagggatttgttttctatgctccagttccaacagaggatctggacattgcctcttccctgcttacttccttgattggctggactccctctacatccccagcttctacctgaacatgcattgtaaatgggaagtctgtgagcagactgtagacaggcctgctgcttggggaactgtaggaaatttgattcaccccaacccacagtaaacactcaggaagatgatgggttcattacgagttactcacatccaggggtaggcaggcatgtggcgtgaaactccagaatgctgagagagagctggaaggtacaaaaatctcccactaagtggtattacaattttcggttacaaaatcagaatatcactttttatcccataaatatatattaatatatatataatgtatggactatatatagggaataaatatatgtataatttgtctctacatagggaatatgtatatatgtaatttatcaataaaaaatttgttaatctcctactaatgtaaaagggagtttctcaaaggtcttgatgggctcctcacttgattagaaggtggtaactagaagctgggtgcattcataaggatttgaaaaccaaggaaattatcacctcttgctgggaaggccccatcccttgctctgtgtagatgtattatacctgcagtctgagtctgtgggctcatttccatgtacactctcaccttcagctctgccgccttgctggcagtagctcaggccacaggtaccctggacagtggagggctcaagcaagaccaaatcttctacaggtagatgattcccaactcacaatctcttttctcaaccccagagttttagttcccattccctggtgctgctggatgctactgccaaggtctggacaggggacatggagggacactgagggtgatgggtggagatgtgggaaagagatttgtctccgctcccagaagaagcaggcaaagggaggttgggatgttttgactttgaggtgtcagtggtcccaggttcagcccactctttgtcctctccatttcttcttgatgccctgaatgttctacctgtcatccaggctccagtgaacaagccaggaatcatgcttgacctctcactctcctgtttgccccaaagaaggcatatgcctcccaggaacgtatgaacatgcacttctgtagctttcttcttagaaccttgggcaccaatctttttcagctgtttttatttctttcattttatttttacgtggatcttttcagcaaacattctagaggcttcttgaatcctattcaatatcatacttgagccaaatggtaacgaattaacaaaaaggtagcaaattattaatatgctgtcaatgtgcattgtatgtggatgggagatttaactgttaaggtctaaaggtccatgattttaacctcattgctcattgattcaggacatgatgacatacttcaggtcattagggggatgggttaaggaagtcttcctgaagttctaaagagcgtgcccctctggagtgggtgacagctgcatagcttgtctgccgtgctctgcccgaatgctgttttcacatggcgtctcttctttctttactttcaggtagaaattgagaagctggattaccatcattatctgcctctgttttttgatgggctttgtgaaatgacatttccctatgagttttttgctcggcaaggaatccacgacatgctggaacacggtgggaacaagatcctacctgtccttccacagctcattatcccgataaaaagtaagtgaaccggtgaaaaagcatcactcagtttatacggtgttgctttttgacaacttgctaattaagcaataaaccatgacagactgaggtgatccccagttttgcaggaattttcataaattgacttaggaggccagacaacccaaatctccaaaaatatatcccatcatcaatatttcactatggcttagccacataaataaaccaaattccatggggtttgtgctaatttaaaatgcctcacagtaatgacataagcattaacattaacttacgcatccagaggtctttacctgctgctgctaacttccaagtcttttttttgtaaatggcatctctaatttttaaattataaacaccgttatgttgagtatatttgaggtagtaccattcataattttaaggaagggaagcccagctgcataggtgaaaagaagaatgtttttaaatacctgaaacttttaatctacaataggtaagctgggtgactctggggtagccctgtgattggctttgtctgtgaaatgagattgtccttcctttctgcatgcaccttgctcacaacattgcacggccccttggactggttgtctaagaacctgaggttgtcccacgtgacagccttctggggttccagaacactctctggccattcttaccttgctgccagtagagccaccctgatgggcatgcctggcatccactggtacaggctcaggaagaggatggcctctcctcaagtcaaggtggcagggctggcccctctcaccctcaccagcacatcccctccccagccccagaattgcccacctgtcctgcattgctactgctgctactgctactactaattaaaagcagaggatcagtgcctcctctgaacactcattctgcagatgagggagaccctacctttttctcagccagagctgctccaggcactttcaccccctggatccaggcccaactgcccatggcttcgaggggtgaggaggcccctgctccccccgccccaagttctacctcatcttccactccaggatgggcagcttcccaaaatgattgacaggacgcttagctagtcttctaggttggggaaccccaccctcactggctcaggtgagctcttgccgtgtgctttcatcagaacaagaacaaactagctcaacatagggtcatctcccagagtctggattatttaatcgtatccaaggtcaccatttttattcattcattcgaatttatccattcattcaaatgtatcatgatcaaaatgctagatttccacagttctgctcttactgcttgcatcaaatcaactctgaaactctccctcagatctttgaggtctccgtagagatctgtaagtgaccacaccacatttccaccatgacagacagtgaaaccaaaccaaaggacggtgctacctgatgtgcgagtaacacagagagaaaagagactctgaaaaggggcttattaaatagcagcttgcttgcctcatccacagctgcaggaaggcaggctccttaaaggctgtcagggagggtgtagcgtcccgagccacgttaaaaccttttccaaaagtaatttcttctctcagatgggtcacatttttgaatacattaaattctacttgaactgctacatttctaaaggatgatatgtagctttctctgataaacaagaaaggcccagaatattctccgcaggaactatttgttcttttcctctggcagaatagcagcaatattcggacatatatcctttttttttttttaaatcaatgcttcatgttgggatcactgccttctcaggggtctctccctcagagtccactggaagacactgataggcagaaaaggaattgctaagtaatattttgattatgttgtctgcaattaaagcataccacactggagttttgcaggccaaggtaaagtgattttcaattttgtttgatctgtattttgaagatacataaatgagtaaagcgaggagtcatgtgactaaatttacagtacacacatgctagaggtcatctgccgatgagcgaaaacgttatcaagaactcagtaaacatgatttgtcagggaaaattaactagatatgaatttgatgatttagggttccggaagcaatgacaatttatcttggttgatgccattgcgtggctttcagcgcttctgctattcgatactgatcctgagtgtaactgctccttccttctcaatctgtttatgtcactaaaagcagacttttctcaagaagaaatgctgattacttatgtaaggtcatgcacagttccagcacagtgtgaaaaatattatgtgcataaagaaaatctttgaggaggaattctgaaaggaggctaacaggatctagaaaagggctgatgtacataattgacataacgtataacatctctgtgtattttattttcacaccatacccagtataattttgactctatccaggggcaaaaattaacctcaccattaccagcaagcagactagaagtttttttttttttaattctaactaatatctatgaaaacaaagcaaaatgtataaactcactgtgaggcagtgagctgggattagctgcccttgtatttctggaaactgggttgatttcaacaaattagaaggctgataatactggaatgagaaattgacacatttagtggctctggggtttctaatatgataacaaacaagaatccaccgttctttctcctactgctgcttggttcaagcccccaagttctggaataacccacaccgtgggtctcggacacctatttcactgacgttgttttctggcacaactactgctgctcccttttccctcccacctttctgatttccatcttgagttattttgggtcagaaactccaaaatcatgctgacataaagtgctcagggttggtgatggagcattgattgctgggagcagcagcaaaacctcataggggaggctgagaaaagagcagccctcttacttgtctggatcggggattacagattcacatttactccatccagtaggaaaagacaaatccttctcaatccatcagagtgaaaccaggaggcagtgtctggaatctccgcatacgaaattcagaaggggattcttccaaaacagcggtcaagagggcagagaggggccaagagcaaccagcaaactctaacaatctctctcctcaataaaagtgagaacagtagcaacactgcagccacagggggccatgggaaaaatctctacacacagggaaggaagtattgtgcacaatcggaggaaaagaatacctcaacaacatctggcatatgaaccagaagaaacttgtagaaacttgtttgacatcctcaggattcaggaagacgtggcctctgagaaacagaagcagaaatccagaagaggagattagactcaaataaaaagaagtccattttgaacaggacaaggcaaactgaaaatgccgtagtagaactaaaatctccatagaagtatagagaataatcaactgcacaagatcaattataaatgcaacgttaaggcgctctctcagaaaagacaagtgtataaaaataaggccagaaaagatattaaattggaggacatagaacacaaaagagttaaaagttagtgttcccaagaggaactatcagagcgacaggaatagcaatcataatggcagaggtgattcgaagagatgttctaggaggaaaaattatctcttattacgcaggtagaaaatacttgcagcaatctaaagaaaatcagtgaaaacagactcaggtggaggcacaatttgccaaaaactttaaattataacataaagaaaaatccttcaaacgtctggacaggggaaaaagcaatacaacaacaaataatactgaggctaagattttttgcaagagtaaattccagacaacagagcaccttttagagaaatggggagaaacatcttgggcgtgattttaccccggtcatgtgaagaaaaacactgtggacgcagtgactgcagtatccctctgtccttcatccagaaggtgaatggggctgtgctccagctcacagcaagtaaagcacagtgagagtccccaagtgaggaggacagtgtagtgtgaaaagcagtcagcactaaacctagggttatgtctaaatagtggagggaaaagagtttcaaagccacatgaagtgttgaatcataattttgcagtaatgactcttaaaaatcccaggaaaactggggtctacaccctcaaagtcaatgcagaagataaaggtagttaaacagagtctgtctattaaaaggacaaaagctgagtagacagcaaggaagggctaagaaccaaaagcacaaaataggatgaagaatgtaacatccaatagatcagctacgaaaattaactttacaactgaaaaaacaaaatctgtatgtaaactctctaaaaaacaaaataatacttaaatatgttcaaagatatattggaataaataaaaaagcagaagtcgtgattttaattttagaaaagtaaaatttaattgtaaagagttttcaagtgtataaagaggatcaatttataatgattaaaatattcacaacaaaaatttaatagtcatggcccactgtgtactgcaaactatgacatcatatttgagaaagaatcagctgctactcatcgttttcaccccggaaggaaggtagacttcttgactgagagctaaaaagatccctgtccttcctccacttcctgacctttgactttaagatctaggatcttcaccaacccaagtgaacagccttcctgctgtagcaccgcttcccaagcttcagtatgcatccgcggaccttggtaaaatgcaggctccagatcagcagatgcgaacggacctgagatgctgcatctctgacaagcccgtggtcgatgctgttgctgccgggctgaggcaaggcctgctagggcacagtgagtgcttggacgccccaggccccaccaaagagtcctggacacgagagccaggcgtgggacatgggtgggaggggaagagatgaatgctaattttctcccttgtatgtgggatcaggagatactgcattgttcataatgtgcatgattagagaaacacaactttaagattttaggccttaaatgtaaccattcatggattaaaatagatagtatgcatatgaggtacaagtgaaagaaaaaacactttcagtaaggcaatctttttttaaagaaagccaaggtaacttgtaaaaaaatagaaatacaacaagaggacaaaaggaaaaccaaataatctgttgtttccacgaaggattgggagaaataattcactagtcacaaggaaaaagtcttgatttggaaactcctttgaaagactggttttagcagggactgccagtcacctcatgttgattagaatttaactcccctccacaaacataccttcttccccactaattaatgatcacataaatactgttcactgcaagtcccacatctgctatgattacttttctaatacaacttgtttttctcagcattgataattgcctctcattttgcatacttgatttttatatacttcctaattttcttcaagtattacaagatctgtcaaaagaatattattttcaaaatgttcagaacattaaataacccagatttatctgacttcatctgaaattaattttatttccctttctggagacattcactcttccatcctccatccatccatttgctccaatctggaccacatattgtcttggcctgacacttcctgttactccttttttatgttcaacctctttccttagctctttgtcttgttttcctcatcactgttagagtttgcatcttctagtaatttccgggaagcatatgaaaggtatattttttagttcttgcatatctgaaaattctatcatcaagcttgattatgagtttgctttgttgaaaacccttttcattcagaacagggaggtcatgtctctatcgcctccagagtcttatgttgctttgaaaatcttgatgcatctgaatttctagtcatttgcctgtgacctattggcctccaatctctgaacatttttgaatctttatctctggtgatatgaaattttatgtggatatactttaatgctttttttttttttatcaattttcccaggaaatttcaatttagagacctatgtctttctgcactaaaaactttttatgtgttacttctttaacagtatcttctctctgttttctcttggttttctgatgtaattccagccagtcatctataatgcctcccagtggattctcttagttctttatctttttgttcattttttcctactctgtcgcttagttctatttcctgagaaatgtccttgactctatcttccgaaattgtgaatatttcactttagttattgtaactttcctttcctctgactgttcctttttttatactatttggttcttttatgtttattctcttatctctctgtgaatatttattatagatttgtagcgcttttctttgtttggggtggggggtatttagcagtttctttttggcttcctgacttattatttttttgacttattcagtaaaaataaattttccctttgctaccatttcagactttctttatcctgcttatagatcaacaggtaatatactggctaagagcatagcctggaatcagactcaccaattgaccaacaaggcagtacctctatgactctgcaagaatctcagcattactgggcttgcagtgctcccagtgcagatacagcttagacaacaatacccaagtcctttcgaatatctgaaaagccttccaaaacaggatagctataaataagcccagactgtgaagaccgcaatacctaacttttcaatgcccagacgtcaagcatcaagaccatccaggaaaacatgaactcaccaaaaaaaaaaaaaaaaaagtaagttagttaccaggtaccaatcctggagaaatagagatatgtgacttttcagacaaggaattcaaaatagctgtgttgaggaaattcaaagatattcaagatgacacagagaagaaatttaggattctgttagataaatttaacaaacagatccaaacaaaaagaaccaagcagaaattttggagttgaaaaaatgcaatgacatactgaagaatgcatcagagtcttttaatagcagaattgatcatgccgaaggaagaattactgagcttgaagacaagctattggaaaacacacactcaggagagacaaaagaaaaaagaatataaaataatgaagcgcacacttacaggatctagaaaatagccccaaagcggaaaatctaagagttattggccttaaaaagaaggcagagaaagagatggggtagaaagtttatgcaaaaggataataacagagaactccccaaatctagagaaaaatattaatatctaagtacaagatggttataaaacaccaaccagatttaagccaaagaagactacctcaagacatttaataattaaactcccaaaggttaaggataaagaaagaatcctaaaagcagcaagagaaaataaacaaataacattcaatggagccctaatacatctggcagtagactattcagtagaaaccttacaggccaggagagggtgtcatgacatatttacagtgctgaaggaaaaaacttttaacctgtaatatatccagcaaaaatatccttcaaatatgagggagaagtgaagactttcccagaaaaacagaagctgagggatttcatcaacacaagacctgtcctacaagaaatgctaaagggagtacttcaatcagaaagaagaggatattaatgagcaataagaagtcatctgaaggaacagaactcactggtaatagtaagtacacagaaaaatagaatattatagcactgttattgtggtgtacaaactacacttaagtagaaacactaaatgatgaaccaataaaaataactacaacaacttttcaagacatagacagtataataaaatacaaatagaaaaaaaagttaaaaagcagggggacaaagttaagatgggggttttgattagtttttgttttgcccattcatttatgcaaacagtattatcagcttaaaataatgagttatgagatagtatttgcaatctcatggtaactcaaatcaaaaaacatacaatggatatacataaaataaaaagcaagaaatcaaatcatatcaccagagaaaattaccttccttcactaagaggaagacaggaaggaaggaaagaaggaatagaagatcacaaaacaaccacaaaaccaaaatatcaaaatgaccatagtgagtctttatcaataataacattgaatgtaaatgcacaaaaatctccaatcaaaaggcacagagtagctgaattgatttaaaaaaaaaaaagacctaatgatctgttacaaaaaacacacttcacttaggaagacacacgtagactgaaaataaagagatggaaaaagatattccatgccaatggaaaccaaaaaagagcagaagttgctatacttatatcagacaaaatagatttcaagtcataaactataagaagaaacaaagatataatgataaaggggtcaattcagcaagaggatataacagttgtaaatatgtaagcacccaatactggagcacccagataggtaaagcaaatattattagagctaaagagagagacagaccacaatacgataatacctggagacttcaacaccccactttctgcattggacagatcttccagacagaaaatcaacaaagaaacattgacttaatctgtactatagaccaaatgaatctagtggatatttacagaacatttcatccaatggctgcagaatacacattcttttcctcaacatgtggatcatctcaaggatagaccatatgttaggtcacaaaacaactcttaaaacattcaaaaaaattcaaataatatcaagcatcttcttgaactacaatggactaaaactagaaatcaataagagaaactttggaaactatacaaatgcatggaattaaacaatatgctcctgaatgacctgtggatcactgaagaaattaagaaggaaattgaaaattttcttgaaacaagtggtaatggatacacaacatgcagcagaaacatgagatacagcaaaaacatgactaagagggaaatgtatagctgtaaggctacatcaaaaaagaaaaacttgaaataaataacctaacaatgcatcttaaagaactagaaaagtaagagtaaaccaaacccaaaattagtaggagaaaagaaataataaagaccagatctaagttagaaaaaaaaaaagacccaaataaataaaatcagagataaaaaaggaaacattacaactgatatcactgaaattcaaaggatcattggtgggtacaataagcaactatatgccaataaattggaaaatctagaggaaactgacaaattcctaaacacataaaaacctacctaggttgaatcataaagaaatccaaaacccaaatagaccaataacaagtaatgtagacaaagcataataaaaagtctcccagcaaagaaaatcccaggactcaatggcttcactcttgaattctaccagacatttcaagaagaactaataccaatcctactcaaactattcccaaaaaaaaaataaaggagaagagaatacttccaagttcattctataaggccagtattatcctgataccaaaaccagacaaagacacattaaaacaaaaagaaagaaagaaaacccaagctaatgtcactaataaatattgatggaaaatcctcaacaaaatactagcaaactgaattcaacaacacattaaaaagatcattcatcatgaccaagtgagatttatcccagggatgcaaggatgttacgatatatgcaaagcaatcaatgttatacagcatgtcaacatcatcaacatatgaatgaaggacaaaaagcctatgatcctttcaatttgtcctgaaaaataaaaacaaatgtttaacatcccttcatgatgaaaacccctcaaaaaactgactatcaaaggaatatacctcaacataataaaagccacgtacgacagactcacagctagtatcacactgaatggagaaaaactgaaagcctttcctcctaaaatcaggaacacgacagagcgcccactttcaccactgttattcaacgtagtactggaagtcttagctagggcaatcagacaagagaaagagataaaggggatccaaatgggaaaagaagaagtcaaattatccttgtttgcagatgatatcatcttatattttgaaaaacctaaagactccaccaaaaaactattagacctaataaacaaattcgtaaagtagcaggatacgaaatcaacaaacaaaaatcattagcatttccatataccaagagtgaacaaactgaaaaagaaattttacaatgtagtcccatttacaatagccacagataaaactaagtacctaagaattaaccaaagaagtgaaagatctccacaataaaaacttaaaacattgatgcaagaaattgaagaggacaccaaaaaatggaaagatattttatgttcacgaattggaagaatcgattttattaaaatgtccatactacccaaagcaatctacagattcaatgcaatctctataaaaatacctatgacattcttcacagaaacagaaaaaaacaattttaaattttatatgaaaccgcaaaagacccagaattgtcaaaactatccgaagcaaaaagaataaagctggaggaatcacatcatctgacttcaaattatactacattatggcataaaaaacagaagcacagaccagtggaacagcatagataagagagaagtcagaaataagtccatacatctacagtgaactcatttttgacaaaggtgccaagaacatacactgggaaaagaaaatctcttcaataaatgctgggaaacctgaatatccatatgcacaagaatgaaactagacccccatctctcaccatatacaaaaatcaaatcaaagtggattaaagacttaaatctaagacctcaaactatgaaactactacaagaaaacattggggaaaatctccaggacattggtctgggcaaaaatttcttgaacaatacctgacaagcacaggcaaccaaagcaaaaatggacaaatgggatcgcatcaagttataaaccttttgcatagcaaaggaaacaatcaacaaagtgaagagacatctcacagaatgggagaaaataattgcacactatccatctgacaagggattaacagctagaatgtattaggagctcaaacaactatacgaataaaatctaataatccaattttaaaataagcaaaatatctgaatagacatttctcaaaggaagacatgcaaatagcaaataggcatatgaaaaggttctcgacataattgatcatcagagaaatgcaaatcaaaactataatgagatatcttatcccagttgaaatggcttttatccaaaagacaggcaatagcaaatgttggtgaggaaaagggaaccctcatatgctgttggtgagaatgtacattaatacaaccactatggaggacaatttggaggttcctcaaaaaactaaaagagagctgccatgcaatccagcaagcccactcctaggtatatactcaaaagaaaggaaatcagtatatcaaagaaatatctgcattcgcgtatttattgcagcactattcacaataaccaagatttggaagcaacctaagtgtccatcaacagatgaatggataaaaaaaatatggtacataaacacaatggagtgctatttagtcataaaaaagaatgagatcctgtcatttgcaacaacatggatggaactggaggtcattatgttaagtgaaataagccaggtgcaaaaaagacgaacttcacatgttcttacttattttggggtgctcaaaattaaaacaatttaactcatggagatagagagtagaaggatggttaccagatgcgaggggagtaagcggggatggttagaaggtacaaaaaatagttagaaatagtacgacctagtatttgctagcaaaacagggtgactatagttgaaaacgacttaatcattcatttttaaataactaaaagagcataattggattattagtaacataaagaataaatgctggaagtgatgaatacctcatttaccctgatgcgattattacacattgcatgcctgtaacaaaatacatattgtaacctataaatatatatacctactatgtacctacaaaaaataaagcaaaaataaattaaaatacatacagaaaaccaccatacaattaagagaaccaaaaaccaaatgttggttggttcctttaaattacgaataacattgataaatatttggtaaacttagaattaaaaaaattaattagccagatgtggtgatgccgcctgtagtcccagctactggagtgggaggctgaggtgggaggatcgcatgagcccaggagctcagtgttacagtgggctgtgattgggcactgcactcccgcctgggtcacagagtgagactctgtctcaaaaagtatatatatataactaaatttaaaatgagagaagacagaaataaccaatatcagaaataaaaaaggaagtgtcacacaaatcctacagacattgaaaatatcatgatagggtattaagaacaacttatccctaaaactttgaattgttcatgaaatgatcaaggtggaaaatataacttaccaaaactgacacctgaaaaatagaaaataagttaaaatacaaacactaatacaacaaatgaagaaattaagtcagtaattaaaatcccccacacaacaatagctcaaggctcacatagcttcactggttagttgtaccaaacagctgaagaaaaaaataattgtcattttgtacaaatttttccagacaataaaactggagaatacacacttcaactcatttcataaagctagcataaccttgataccaatattcatggatattataagaaaggaaacttccaggacaatctcactcataaacatcaaggaaaatttattaaacaatataactaacaaatagaatccatcaatatataaaaaatgataatacctcatgacaaagttggttttatttcaggagtataagactggcttaacactagaaaaatcaatcaagccaatttacaacattaatgaattaaaaaatgattatttaataaatggtgaaaaagcatttgataacatttaacattcattcatgtatttaaaacaaactgagaatagaaaggaattcccttaatctgatacagggaattttatcaatcagaataaactagtttacatttcaataacaaccaatcccaaaaatcttaggggcttaaaacaatacattacttaaaacatgaacaatatagatttctgactgtgcaacctgtctgttgcaggttagcagcaaggttctgttcattgtcattgcttagggacccagcctgatagttgttgctggttcagtaccacaggaaacaagagctcagaaggtccaccctggaaggggcacatttcacttctattcactattcattggccagacatagtctagggcccatccaaccttaacagggccacaacgtgcaatcctacaagggcattatgaatacattttacagcccctggattctgttgtcttcctgtgaagagtgttgattctaattctggcagacaattaattggacacagaccccaaaccttgtcttctctgtggtggacaacagctgaagttatttcattttcagttttttcatcttgcagcttttgctcgccatctgggactactgggaatctccccatgtgtgtaattctaagaggtcagctaaggcagagcttacatgcaaatttcagtttacaccctctgcgaggccctcgcttccaagatcccctcttccaattttctacctgctcttccagcccagaactctctctccaagtcagtttacctgctttctgctgccccaggccacacaacttagctcgtagggaaaaagctttcaactcaccttatcaggtgcatttccagattttaagggcagactcctctccaaagtcggcctactttaaattctttggcatggctttcaaggattcccactatctggctgaaaattttgtttttgactttatttcttactatttcccttcattcaccctgtgctctagccaaaccgattgtgccgtagaacttgccttgcacttttctaattctttgtcttcgctcatttttcggaatgcccattctcacatccccagatgcctaaacattaagtgaccttcaaagcccagctccaatatgaattgatctataaagcctcttctgattcacctctccactccctaccctcaactccagtcctatccccactctgccttccctccccgacataactttatagctcctctctcatgtcacttagaacataatgttagaaagtaatacatccccacagcatctaatgtcctggctagtacacaagagatgcatcaaaatatttgcaagattaatttaataaggtacataactgctgtctgtactgaaatctgtataggtgccgtaatcaaaagcatgaagtggccatttgggcctgccactgtactatatattctataaaaactgtcgcataagactctctcatatgaaacaacagatgaagggtataatgatatagtgctttctatttattgggagaattatttaagtggtgagagtacatttctgttgattcatctacattctctcacgtgattctatcataagcagcaacatacttttgtgagatggcctagtaggaggagaggtgaccctggttgccaaagaattatggaaatatcactgctttacaaatagacgggccataacacggtggcttcattaggagagctctaacgaggtgaggtcatccggcagtaaagggcaggcgtgcacagacacagcggaagaaacctgagcaagaacattttaccaagcaaaatattctgttaaggaaaacctagtggggaaaaacaccaccgagtaagaatgaaatatgagaatccatatcacaatacaaaaattactttgggaattctatttactaagaaagaagcaagtacaattgaaatgcattaccctttactcatgatctaataattttacttatcttgacattttccaagtaaattattctgaacgtgatcataattattttaaaagtaatgatttttaattttggaaaaacaagtctaatctgtttaaaaaacattaaaaagaggtgtctgacttaggattattttggttaccagatacagaaagaaagtggtttcaaattgtcttagacagtaaagtttgcctggtcactcgccagaggaaggaatcaacatcaggcctcgccctgtatgaacaggggaatgaggaagggtgatccagcacccacgatggaggcggcagagatggagagaatggacagcttagctgtccctgccagcaaggcacagcatgtttaaagagagaaccagctagatgcattttcaagccgaatccgccgtgcattaactgtccctttcccactctcaaataaataaataaacaaaccaattctatcactcttctagtgtaatgtgatgttgaggggcaaaagctctgaagtcagactacctcatcaaaattccaactctaccgcataactgctatcgtccaagttaactacctggagactcaggagcctaacttataaaattggggcaataggaccgggcgcagtggctcacacctgtaatcccagcactctgggaggccgaggtgggtgggtcacctgaggtcagaagttcaaaaccagcctggtcaacatggtgaaaccctttctctactaaaaggatacaaaaattagccaggcatggtggcgggtgcctgtaatcccagctacttgggaggctgaggcaggagaatcacttgaacccgggagacggaggttgcagtgagctgcactgcgctccagcctgggcaacaagagcaaaatttagtctcaaaaaaaaagggggggaggggggcaatgatgataatgacatccaatttattgggctatttcagtgattaaatgagctaatatgtaaggttataagtgttatcattgtcatcattatcatcgtcatcattatcatcatcatcatcattctctgcctaaattacggcaacattttttagtcacccgggctagagcctcagactgagaatcttcactcctgctcccatgtggaggctgagctgtagtcaggactagcactaccgcagtgcctccccttgctcttcaaaagttgccgtgaaaccccacttcatcactattactagtggcttattccttaagccaccaaagcacaggacacagcaggtgtctcgaatgcctgctcaaagtccaccctagattctatgtttgctgtgccgctttgaacatttctcatgagcacacgccaggttggctgtacaccagtatcccatgcctgtgggtacgctgggagggtgaggggcctgagcatgctgagtgcagaccggatcccagcttgctactaactagctgtgtgatctcaggccacctgactcttttaactgtcccagagcattagaaaactgattgcccagagacactgtaaggagtaatgagattatacaaatagaacatttagcatggtgcccgatcaagaataaattatttttatatccttggttttccttcatggtcatgtctctgcagacttctaaattggggtcatcaaaaaaaattgatagatttggattctataacattcatccaagttacagtaaaaactttagatggaaactggactcgatcaaatatagatacatgaggtatcccactcagggctgtacaggctggtaccaaatcattagtgcgtattacttggatacaattgttcacagagttaaaaaaaaaaaaaagaaagaaagaaaaagcctactttttcaaccattcctgtatcctccctataaggaaaaccatagaggccttgccagatgctttgctgatacagtttatttattatctcctttatgaggaaacatattagaatacatgaggttagcttggctggccttattccagagagctcactctgactcctggtaacaactactattttcctaggagctcccgaatcacctgcttaaataatcagtcctagaatcacagcagttattgatgtcaggcttagcagtgtgtagttttcaaactccttcttggaaattggtctctttacccgtcttctattttgtgcacatctcttgtcttgttttgtgaagagcctgtgcacattgtatctttctttacactccactgcttctactgtctaaaccctgtggaaatgtagacaccttttctcaaccagaagaagaaatgtagcagtcattctttttttttttttttttttttttttgagatggagtctcactctgtcgcccaggctggagtgcagtggcgcggtctcggctcactgcaacctctgcctcccgggtgcattccattctcctgcctcagcctcccttagtagctgaaactacaggtgcccgccaccacgcctggctaattttttgtatttttagtagagacggggtttcaccgtgttagccaggatggtctcgatctggtgacctcatgatctgcccgcctcggcctcccaaagtgctgggattacaggcttgagccactgtgcccggccctagtcattcttagaagtagtggtgcatgatgcagcattctcttggtttttactctgaaaatggtgctaactccttcctttggtcaccttttcagttttcaccccaatctttgcagatgaactgagacacaatttaggtacagaggagcaaggagctccaaagacacgaacctgccccgcctctgacagtgccacagtgctgatgggtttactctcagtttctgtgagacgtgctcatacgtgtgtaagcaagtgcaggcccaacctgggcaacaagactgaaaaggagtatgttggatgacatgacgcttcaggtttcattctctgtgtctggaatatggggagtgtcaaatagatcatgctagggactgcatcatggagaccattttggtaactgaatactttcatttactcaaacagcatgaattatgtatctacatttaaaacaaagtatgtcatggagagaatggccaaacactttcaacaaatactaaattatattctacagccatgaaagaatatattttgatctattgaaaaattgaaaaagagtcagccacttgtaatggcaaaactttgatggaaaatctgagttttgcataaagatagttgcatggcatgctatggtatttatatattttacatattatatatgtgttgagagaaaaatcaatattttttgtatgacatttacttcaagtaggagaaacttgaaaacaatgaattaaagaaaaaaatgtaatccttattataggcttacctcatgtccataatagctgatctaaatcgatcatactttaattgcctaggaatatgataaatcaggctgtgtcatatttacttatatagcaattgagctctgttatggaaggagaaaaatttctacaattttgaaatctaaatttggtttgaaaatatattttgaattcattctaccctataaaatagaaaattatatggttggcactcctgaactagcaaaatttatatccattgtaatctaattcaactaacgctataatgggcccaaaacataaaatatttattaaacattttaacttcagaaaaaataataaaattctatgagacactataatagacaaattcataaagacaaaaagtagattatcagggactacagcaggggcatggggagtctttgcttaatggctacagagttgtgggtgatgaagaatttttagaaaaagataatggtgagacttgcacaacattgtaaatctaattaatgccactaaattgtatactttaaaaaggtgaaaaggcatggtggctcacgcctgttaatcccaacactttggaaggccaaggagggcagatcacttgaacccagaagtttgagactagcttcggcaacatagtgagaccccatctctacaaatataaaaaaattagccagccatggtggtgtgtgcctgtagttccagctactcaggaggctgaggtgacaggatcacttaagcccaggtggattaagctatagtgggctatgatcacaccactgcactccagctagggtgacagagtaaaaccctgtctcagaaaaaaaagtgggggggagtaaatgccatattttatgttacatatattttacccactaaacaaaataaggtattaaaatacataagaatgataaaaaaactaacatgcctgctctcagcactataatgctatattttcttttagaaattctagcctctgtcacctgaccaaaaaaggagagataaatattagaaagcaaacacaaatttaacaatatttttggtaatatcattacatataaaatccaacttaattcactcaaaaacaattagatccagtaagggaattaaataagttagcccgttaacaaagtaagtatataaaagtcatatacttttgtgtgtatattatcaataacctttaggaagaatattgggattaaataattttacacaaataacaacaaaatatagaatttctgtgagtatatctaacaaaatttgcaggatctatgtgaaaaaatactataaaacttttccaaggaacttaaagacaagaaaattgaagacatatcatgttcctaatggaaggattcagtagtaaagatggcaattgtctgccaaattattctctaattttaccaaagggccaagcacatttgcaatttcaactaattatcttaaagtttgtctcaaaaaataaagggttaaaaataattgagagaatattgagaaagaacaatgagaaatagattgaattctgatctattaaaacacaaagttacaatcatgaataataatatgtaataacaaaagaaaaatatgcactgtatattgataattttttagaaagcagtttttaaaagcgcttatcttttagtggaacatatgtctatggaaaagatagtcccttctgttagcgtctcagtacacaagtttctagtatttatgcagtttacattctattttataaaatgaggtccgagtgcaaatatgctttatagtttacttctttagtcacttgtgtcttaaacattttcctattttaaactattttttctattagatgactaataattttatagtttttcattgtgtggatatactatagtttacttaaacaatttgttgttcttggaacatttagattgtttctaattatcaataatactgggcttagcattctttcctacaatgctttgtgcacatttgcctaaatccttggactaactacccagaaatgaaactgctaggttagctgttttatgcatttttatggcttttaggtttattgccaaactgctctgtagaaaggttggaatagtttataacatggtgtctatcagggcgtctcctcttttctcttttctcaaacctgtttccacactgacagtgttaaattgtcaacaactttgtgttaacatgatattaaaaattaccaatgaagtttgtgaaaggaaaatatcttgggcccccaaaatcactcaggaaaagtcaagctggaaactgcttagggcaaacctgcctcccattctatcaaagtcactcctctgctcactgagatagatgcaaatctgatttgcctcctttggagaggctcatctgaaactcaaaagaatgttaactgtttgtgtatcacctctctgtgacctggaagctccctccccgcttccagtcttcctgcttttgctttaagttgtcctgcctttccagaccaaaccaatgtacatcttacatatattgactgatgtctcatgtctccataaaatgtataaaaccaagctgtgtgccaaccaccttgggtacatgtcaggacgtcctgaggctgtgtcaggggcgtgtcctcaaccttggcaaaataaacttcctaaattaactgagacctgtctcagattttctgggtttcacaagttgaacattccagaatagtaaatgttcatttttatgtattaatttgtgcgttgtctgtttatgtgccgtgcccatttttttaattggaagattcagtcctttattgggttgtgatagctatttgtatgttaaagctattaacatttaaagcatatgtcaaaaatattttttagaattttgtttgcttttgccttttgtttggtgtttcttgttttaaaagaagaagcagaaatgtttccttttttcctgataccacaatagtgaatgacatctaatagtagaaaaagttctcactttgcaaaaaaaaaatcataaaatagtggattttatgcctgagaaaattatacatgtagcatataaccatttaagataaataacttttaccacccttgacttcaaattattttttccttattcttcagcaatttctctatatctgaagcctctatcttgtttattatacctaaagccagtaagcagtacaatagaaatccaattttctgaatagaaaggttccatttgttgatctataatgtcagtagactcctcatgttagaaccttttcaaaaccttaaatcttgagttcaaagtcctcacttatgtcttgacaatagctttcaggcccatcaacaaaagaataaacacatttcttctctttcaagctacaaaatcatattctctttatacctgttagcatactttttcaaaggaaaagaactgtttcaaaaaaaaaatctttttgctttaattccgctgtgacagtaagaacaaaaagacttccgacttcatggtgtatcttaattctctgagaatgaagaagagaaatagaggaactgaagagaaaatgggcagtgtaagaaatccctgttggacgaagttaagaggcttttaaatagtgcatatcctgcctttgtttcacagctactgcagaagttttagagccattacctgtccattgaggaggacttagagctccattttagatgccattacgcgttacagttcaggcattttacttcttggtcactgtcaatccaataacgttgatcacaaccatgttaattcaggcaaggtttcctgatagctaatatctaatctatgtcctaatagttaatatcattatccattgtgagagagattattaatgcatgcccaaatgatcaattaggtatagacatggacataaacctaataaaaatttaatgttagtgttactcatatatctcatatatacatatgtgtgcatatatataatatatatattatattatatatataaatttactccttgataccagtatattctacagggcaaacttcttctctcacattggcagtagatcagcatacccaggctgttttattgcaaccttcggcgggcacacactaaaagaacaacactgggatacgccagcatccagtgaccacaacggtcaccaaaaccttttctgcaattaccacattcaggtagtaatcactttgttaccttccataggctctcctacttatgacttcatagtgtcaacagaacagctttttttaaaacacaaaaacaaaacctatgaaatggagtgaggactgtatgtgctcagtcatacatttcttttaatatatacagaaatgcaaacaacacacccatgtgattctgttctgtgtctaatccttcctcactaagcagtttataagatatttagctagctgtggctctgagtccttcttaaggagtgggatgggaaggagagatgaataaagagaaaagaaagaaacccaggatctcaaacatctgattctgtttggttgataaggcaaggtgggacccagggattcttgagcttgggaaaaatcactacagcctcaccctccttttgtatgcacctccatactcctctccagcacttccaaacgatcccaagaaagacacactcccagtgacacatccagtcagggtatctttctactatctcttgaatcccccaggggaatctcatgcatccaagctggagcagcccctgcagtgaaagaactccttactgggaagctagtccctagcgcgctgcttcctctcctggaaactcttcatgtaaatgacatctactcagccctggggtttgttcccacatctgggagccttcccttaaccctagactaggcgtgggacttgattgtctgcttaaacgccctgtccttcttatgtgtaattgtcacatttgtcatacttgtttaatatctttttccatactattttacaaaccccaagaggttggtaccatacttgcctgattcatttctgtccttccaattcctaaaacagtgatgggcatgtaatgcatgcactctcaatagacatttggtgagggaagtctaagtaagttaatacaggtgaagtgctcggtttaattcctggcacatggcggtgctcactacatgttagctacaggtgctgtgaatcacgcacatatctgtgcagtcctgaagcctaaacccgttgagcatagttggtagactttgaaagaatatcaactgcccccaatccttagaacatttctggcctgccagttctcctggtaacctgagcttgtcagtacataaggctcactaacccctgacattctaaaaaggcaaaacagcttttagatcagataagaccagatagagagtctctactgctgactgcaacacgctgcgtgccttcttcctcctcaccttctcatggtgatctgaaaccttgttcttgaatatctcatgactccagctcttaagctaaatgatagcattctaattttagttgtttttcagcagatagattttgtcctgcagtgtgtctaactgctgctgtaatgagccatcatgctgctgagttctatggttatatttaggttggttccctgagtgaaggctgagccgtctcttttcattacatttgtatttactttcaaactaaacaagaacagagtctggactggaccagaagttgtagggggctctgaagtgttttcatgcaacaaaccctagttcgttgctaggggggatgaatctgaccacatttttttaaaaaacttcctagtgattccagaggaaatggctgtgaaaccactaaatgatatcttatattctaggacttttaacagaggattcggtttagttcaaactagccaggcataaaggaagcacttaggataagtttgaactaaaccaaatcctcagttataagtcttggaaaataaggtatcatttagtggttttgcagctatttcctctggaatcactagaaaatttttaaaaataaagtggggtatgattcatccctttcagcaacaaactaggggctgtggtataaaaacacttctgagcaccccacaaattctgaggccaatggaagcgggtagggggccctgagcaattttagcaggtggtgagatgatcagataagcttgagggagggtaaccccgcggtaccttgaaagacaggttggggaagtggagaaagacagaaagaaaagagatccatacaagagcaggctggtgctccagtgaatgggtcccaaggatcagaaccagaggagtagcaataagaatggatacctagaggagagaaggtgaggatggagagtgagaccagagagagaagatgaggatggagactgggaccagagaagaggaggtgaggctggagaccaggaccagaggagaggaggtgaggatgaagaccaggaccagagaagaggaggtgaggatggaaacagggaccagaagagagatggtgaaaatggagactgggactggaagagagaagatgaaaataaagaccaggatgaaaagagagaaggtgaagatggaaaccaggaccagaggagaggaggtgaggatggagaccaggaccagaggagaggaggtgaggatggaaaccaggaccagaggagaggaggtaaggatggagaccaggaccaggggagaggaggtgaggatggagaccaggaccaggggagagaaggtgaggatggagaccaggaacagaggagaagaggtgaggatggagagtgagaccagaggagaggaggtgaggatggaggccaggaccagaagagaggaggtgaggatggaaaccaggactggagcagagagggtgaggatagagactgacactggaggagaggaggtgaggttggagagtgagaccagaggagaggaggtgaagatggagagtgaggccagaggagaggcagtgaggatggagactgggaccggagcagaggaggtgaggatggagaccaggaccagaggagtgttggtgaggatggagagggagacacaaattcaagagatactgcaaaaggaaaaccagatgatttggtaacatgaggaatgcgaaggaggagaaacaggctttgacctggagtgactgggaacaaggtttatctttactaaatatgaggaacatagggaagaaaaagaagttcagggaggaaatttagtctttggaacaaactgaatttgaggttctggcaagatccaggctgatggaaatgtgagctggagttcaagaacagtgtcaggactgcctcagagatgtattgaccaaagcatcatttctttttatagcctgggtccttttgtcccttcacagtggcatctgctttaaggtcatagtcaatctttttcattagaaggtagaacatcttacaaataagagcctttgacttcttcttggagtcatctgaggcatcacattttattaattgcacttttgaccttctataatagatgttttatctggctcttctacttaaaccatggtacttttagccatcttagaaagtgcataacaggctcccatgattgaagaaactggggccaagaaagtgccagtaagttggccaacctcgcacagccagttatcagcatcctgattcccgaccccctgcacttcccactggggcaagtggtgcctttcagaccctccctggtggcatcttgctctgtctctgcagtacagcttgttactttgcactcagaactgtttctttagaactgtcatattcctgtggtctcttatagcttatgtgttgtttccttctaactgaactttaaaaaattttgcttttctttcctactttgtgagggcctaaacgtagtcactttatgttcacttctaccaagaatattctcggtgtttgtaaccagcctatagatttgaacaccatgcctcaccctccttcccaaatgttcgttccatgttaatggttttaagaattgtatggattgttgcatgaaagagattgttgcatgaaaatgtatctgttgtcaacccacatgggttcctttaactccagcaacattaagtgatcttttgtctttcatactgcttatccaactcagagccccggcctcttctacgaggggaaaatgagctgcattcctagggctggtgagaaatcagtgccaatggggagaataaacagtaatcagacaagattccatttaaaacattagggttgcaatgtgtcatccaaagctataataataaaggcccattggtccccagtagagcacagtttaattaaatgcaaccacaagacaactttaccttaaccttgtagacctgatgctttctattaaaatattttctgcttggtccttcttttaccatatagatgccttgaacctccgaaaccgacaggtcatctgtgtcactctcaaggtcctccagcatctggttgtgtcagctgagatggtgggcaaggccttggtgccttattaccgtcaaatcctccctgtcctgaacatctttaagaatatgaatggtgagtgagcccacgagtcaaaatgtcttttaagccaaagaaaaagggagtggtttgaagtagagttaattagcaacacgtttaggatttattattgcatataaaccatgatccatttggagatctaaatagcatattcccacgccttctccagctactccctagggaaacagtaaagttaacaatttcatttattactcctcaggtacagcttacttactcagtacagaagtgctgaagcagttctataaacttccaataattaaatttgaagtttttttaatggtcttttgaatacattagtaggttttgagtttgttctttttcttcatagtgattctacctttagatacttcctgttacaatttcagtcagcttttttccattggtttaagatgaatttttaagcactattattaaaatctggtaaatggttttgatgattcatttattttttgtagtattattctataagctttggaaaacacagatgaattcatatggctctattttaccctaacaaagatattagcaagtttttggtgacctttggcaggcagtggatgtaaatctattcattaagcgtgtgatttcattgaaatgatgagtctaattttcttttttgttgttaattttgaagttccgtacttctcacatgcatgttataagtcaacatgaagttatttcctgatagtggtatcaataagttagtaatttaatggagcactgaatgaaacttttacaacatgatctgctcatcatacattcaagaaaaaaaatcaaacaagaagctgagtttacagcagctcctgccacaaacagacttttgtttggaatcactattttttatattattactcaattgctattatgtctgctccaggcatagactattcaggaaatcatggaattctcaaaaagcttttagctctctttcagtagtagaaccggcttatatgttaaatactatacatatttagaaaaaggacttcaaactggagttataggagcttacaaatgcctgtaatggagtgcttgcaatggtattctgttcaaattatctgaagagctgtgggtaaggtggacattcaggcaagatggttagtctttacgcaaagtaataactgggttttaataattgagtctcttattgttaaaatgtaatgttttagtaacaatattactacatttggaaaatacttatttaaacagtcttcattcatagttcatatttttaccatatagtagcagcaaatatccatgaagttatgggagactcccgatgtgcacctttttcaactaaggtcgataaaagaaactctaactgcatacctcatatttagattctagtaacttgagggagatagagataaagatgttctgctagagatgagagcattattaaagagatggaagcatcagggaacagccacccccaaatgtcttagttaacatttttgaagtgtgcgattcactaatatttcctcagtaatcctcatgcaaacctatgatgcatgtactattactatttccatttaattgttgcagaagttgcctcttgtagctttcctcccatgtgaacagttattctgtacttgatgatcctggaagatgagcctgaacacatttctcctttcttgcctgagtatctgggaataggtagctactgcaacactgctttaatgcttttgttggtcacacaataaaggctagaacttatatctaagcatcattctgtatccctgtataaaagtagaaaatcagtgatgttcaaaggacaattagaatctttctttatcctcaaggaaatctataaagatggataaatattgctgccgcaaagacagataaatcttgttgggagctctagactactaaacaaaacaattggtttctactgctttctcattatagtttttctttaaacctttaactcacaggtgttcatacacttaacaaagaaaattattgactttaagaataaatccctagtaagattttatcaatgtgggacatttaaagttcatacgagagtccttaattggttccaaactcagctaattcttttggagtctttctaaatgcatgcatcaggaattctacatttaaattatttttctgcttaacatttttctgacatttgtagggaaaaatattatcttccgcttcattttctacttatcttagaaacctgtcacaacaatgccagcctgcagtttgctgtattttcagagggtcctattacaaaattggagcattctagctataaaaacttaaaactgttccttaaagtagctatgttaccctagatccaattctttcagaaaaaaaagcttatcgcaggattttcaattacattagaattttcactaggaaaatgatttagctttaataacattttaagaaagcctgctttatgatatacatcacaaaattatatatacttattttatttaagcagatgtccttagtaacagatataattatttacaattaaaattacattagaaattgacagtatgtagcagtagaaaaaactcatcctaaatttcaatgtatttgagaacaattgcacatttccgtattcctctttttttgtatttctcttttatgtaaatcaatgtcttgttaaactcagattcaaaaatatttctttcaagtcccactacaaaattctttttagaatgagaccagatacaaatgacaaaaaagaatgagagaaaatattctttcaaataaaatgacctgtctgtcagcatcccctcaaagcgcaaacattagattagttctactgcctgaagtttttacaatgtctcctgttttaatgtcacatgaacttcctctgaaataagcagtgggggttgcagagccagggagctagacattgggacagtggcccatgtgaggagcccaggcttccagtcttttcaaggaccagttggaaatcaagtaggggagggaggaacagtccatgctcacagcaccaattcaggccccatctacacgatcagagcaatgaaaacttagagccagccccactagatcattcttgttctagcagagaaagtggctgtatcctcttgtgtgttcataatatttttcacagagtttaattaggctatagttaaaacaagaacagataaatctgagatgtgaatggtagtgtagactaaacagtaacattttggagccagaaaagctgtgacctcaggcaaatcccttaaagtctgtaatcatcaatttttctgtctacacaagatatgcatcgtaacaacttttcattagggtgggcataattagagacaaggtgttcagggcaccttcacatggagcctgtccatgaccgggtattaatgagagagccattatgattacacaacattatatacatatccaatattatatacatacaatagtatatattatagaagaatatcatgctctatgaattattatgtaacaacacaaccaggcaactgaaagtgttgtgtgtgacccatagcgctctctcgttgggtgacctgtcgcttggccctctgtgagcctgtgagtggcatgtggcctcccggtctcaccagctgcatcagtgcctttgcttcaaatggttcattttggctctaattgccaaatgcagggcgagtggccaaataagtgaaagactcagattcattcactggtaacaggttttcaaatccatcctttcctggcataatctctcagcttgaatatgtgactggagtttagggagcatcgtatttacaaaggagaaacctctttccagcacagacaaggaaagcctgggccacggtcctctttgaaaaaaccaaactgctgtctaagcttttgagcttatttgcctgcattctaaacagtgaattttggacgtaaaacatgctgtctttccagtgactgctttgaggggaaagaaaggggagttcctacaaaatattccttggatgcatttgtcatacagccaatagcaatttattctttcctatgttctttcacaaatgttattaaaggttacagaaaattaaaacaataggaatcttcaatttatagctttcagagatgaaactaccaaattaatgatgcagagtattacatttgaggagcatgagccaataaatggcattaaagcttttacagctggaatatgggctccgccagcagattagggctctccgacaggcctgtttaccatattttggttcatttctaacagtaccaatagttctgaaacaatccctacctaaaagatttcagactccagatatcagagactctgataatgttgtaaatttatgtcatgaaatatgcaaaagtaaacataataatgaaatatcctgtccccacgtttgtaggaatcaaattgcttggctttatctaagatgtttaccattatagactaataaaaagttcattaaagagacttaaaattttaattcagatgcaggcacattaaaacatatggggaatgaggatgcctgaagtttgcaaaattttaggatgtttgtaccaggtctttgacctgtaatttaaacggcttctaagaaatagaagtaattattttatgttgatcatcttttaaaacaacttctaaggagaacctaggccttgtaagtcaacctgattcaaaccctccttgataaccctccttgatattcgtgtgaattctctgggaccaattctcatgctcttttcaaacgttgatgaacttctgggaatggattaccaaacaacaacagcagcaacaaaaccttcagtttttctgtcccaaagttgatgtatgtaaatgttatttctcctcacagagatttacatttaattttggaattcaggttcatcccccatggaattctgaacaattctgcgttcatgatttacattttagaaatttacttcgaagtccctttgaaatggttaaatgtgttaaatttgaaccatgagattatcctaaattccttgaggaaattattagaactactgccccccacatttctgaaagttagatttggaattgtcatgcatatatctagtctctctgagcacttcctccatgcacacttaactcatttgtctgcagagaatcctgggattataaagttggaagatccgtgtaggggtcctttggtctaagagtatctccaatttaccaaactaatcaaccattacttccacgaaggcaaaatgtttgtgttggtctttccttttcttatatagagcttggcacacctagtagaatcaggtgcctaatatgtgcttgtgtgaaattagttcactaactcagcctacgcaaccagtacttatttattccgtcttgtccaagcagcctcactacttcatggggtagctgttctacttccaaagagaaaggcagctcctgttttgaaaggaaatttacacctaacatttccatctggttcacctctctcatctaaactacacagcacaatggttaatccttttccacatatagcaagccctcgggaaattatagaaaactttccttccccctcggtattcacttctccaagtgcaatatccctacttcttccaagcattctctataagcagagctcccaaagcctggaaaatctttgaggatggggagggaggactcatttctacagaaacagatggttgtgcagcgatctaagtgagagggcagcccaggacagcagatggtcctgggaagggctcaggcctccctccctcacctgatgcccccacgcgtggtcagcccataaagacctctttaccatggtgaaacctacacatgcttatgaggttaaatgcctttcctcttcactgagactgctacatttgagtctattttcaacccaaatccacttataaaaagcatcaggggagtggggtcagtcacaaactgtaaattacgtctctatgtgctcttctctgtagacctccctggttgcgcctgcccggagggaaggattattctgagttgtctgtaacctggtagggcgatgtctaaagaaatcagaatccagctctgaaggctgtgtcttagcttcctggagccacgtaacaaattaccatacacagaatggcttaaacaacagaaatgtatcgtctcccagttctggaggctacgagttaaagatcaaggtgtggacagggccagctctcactgcaggctccggggaagcctccttcctgctgcttctagcttccggaggtgccagccgtccttgagctccttggcttgtggatgacgcatcactccagtcccgccccatcttcatgtggccttttttcctgtgcgtctgtctgtgtctcttctcttcctatgagaataccagccctcataaggattggattaagggcccaccctactccaatactccaatattactttatcttaactactttcattggcaatgaccctatttccaagtaaggccacatcctaaagttctggaaaagacaggaatttgggggagacactattcaatccagtccagatgatatacctctttcctacagcctgtggggagaaaatctcatctttgataaataaaggtagaggttttgtgttcgtttcactccttcacattgctgtaactagtgttactgagcctgctctgcacggactaatgaaaactccctctttcaacaacaaaaatgtcatgccttttcctttcagcaggaagggtttgtttagttaagaaagaaactgggcctggataagttttgagtaggggagatgcagggaattgatgtttctcttcttcttcggtaatgctgcaaactaaccagagatggaagctcacacttccaacagctctggatgctgccctggggatcccatagcagcaccccagggtgctgccgcaccagcccagtctcgagggacctggccacggtgaggctggttcacctgggcctgtcccggcccaaaccagctgggcaggaggctcaggccactctgcctaaaggggtttgtaccaataaatgtgggtcacctggtggacaagcaggggaagatgcttgggcagatgggataatttgtggagaaacaagaaatgggacaaagcatgcagctgccgagcacagcactgaggcgcaaaggctccggctgcagttcttctgggttcaaactgtttgccggctgtggcttttgacgggtcatgtaacaactccgtgccttagtctccataatttaaaaaccaagttactgggaggattaaagcagctcattgacttgcagagaactataagaaggtcatttttcaggagttctacttggagagaaggaggggaatgaattgtggaatcgagggtaagtgctttgaaactagcgtgttaggtaaatgtctcctacctgcagcacagggtttatggagagaaccaaatacatgtggctttatatggtccttccaagaaaattaagtgaaatctttttaagttaatatcataattaacatctaagatgattacatatgaaataaatattcaagaatcaatacctttcccatatgtcagcagtcagaaatgcaatgcaaagttcattttctagatgctactaattcctaattgcaaatattccaacccagacaaactttcactgctcagctctcccttcccccgaagacagtttagttccttccttggccctctcacatcattgcaaagaagggctgagtagtgacctacgcatagggctgcatcagcaggttcactggcctgccccagtgaactagtgaaatcccaacctctttccactgtgttctgttttcgattggcccttatatttgtggtttctctgtataaatctttccaagttgttgtggccaagtttcctctggacatccccatttcaccagcatctggctttaccactgtccccacttatccaactttacctgaagggatcagactgccaggaggatacagagttgcagataggttcatgacccaggcacatccccattgtttctggaccagtggcaaatgtggtatatcaagaatggcttgtgtaagagaatcccattcattgcttctgaaacggtgatgaaaggtgtcgacaaaaagagtcacactctgtaaaatatttaaagaggcttattctgagccaaatatgggtgaccatgacccagggcacagtctcaggaggtcctgagaacatgtgcctaaggtggttgagttacagcttggtttttatatcttttagggagacataagacatcaatcgatatgtgtggggtatacattggtttggttcagaagggcggtggtttacaggtcatagtgggttcaaagagttcctgattggcaattggttgaaagagttaagttattgtctaaacacctggaatcaacagaaaagagtgtcagggtcaagataaggggctgtggaaaccaggtttcttattatgtagatgaagtctcataggtggtacccttagagaaaataagttggcagatgtagactctccgtaaatctcttcaggactgggagggtatggaatggggaaagatctattatgttaatagagattctttatagacacaactttctccccactaaaatgacttttcagtccatttcaaaatatggcaaagaaagatatttggggtgaaatattttgattttctactttgtctgtcatgtgaggttatgctagagtcaggctggaaagtaagccacgttatatagggttaaatgaaacctctctgatgagattttatggtttgtggggtgtgactccccaggtcccttagataggaatttgggcaagagaagtaaaaggtcagagttcagtcctcaaaaggaactgcagtatggaaacagcagctcaggatggagctggaactggcactcatgccccctgcctgtgtgtggaacaggccatgtgatctgaagcctgcttctcagcctacgagacaccctactgccattccagggactctgggagttatctctgctcttccctccatatccacactcagacatcccatcctttcagtaacctcccctgactccgcccccactagcagaacagagggctcgtccctccgattattcccaatctgccttgctgggtagaggtcctatttcttgtgtccctcctcaccaggcgggagagcccagatgccgggtgacagttgggacaactggcttttggctggacctgttttcaaagccatgtttggaatgtgtgcttttgttacaggaaaggggtcctgatccagatccaaagagagcattcttggatctcacgcaagacagaattcagggcaagtccataaagtaaagtgaaagcaagtttattaagaaagtaaaggaataaaagaatggctactccatagacagagcagccccaagggctgctggttgcccatttttatggttatttcttgaagatatgctaaacaacgggcggattattcatatctcccctttttagaccatatagggtaacttcctgatgttgctgtggcatctgtaaactgtcatggccctggtgggagtgtagcagtgaggacaaccagaggtcactctcatcgccatcttggttttgatgggtttgggccggcttctttactgcgacctatttcatcagcaaggtctttctgacctgtgtcttgtgccaacctcctatttcatcctgtgactcagaatcccttcactgtctggggatgcagcccagtgggtcccagcttcattttacccagcttctatttaagatggatttgctctggtttaaacgcctctgataccttgtcacccctccacccctctgaggtaccccaacagggatccacagacaaaatgactgggttgtggctggtttccagtgcttggccagtgacatccctcctgctagctgggaactggcacatttcccaatcagagattgcgaccaattcagctaaggccttacagatctgcctagagaaatctgtataatatgctttaatgtatttaaacgctcaaaatgggccccaagtgagcaggcatgcacatattcgcccaagagaaaatagcgttcttttctatttatgcaacagaaagttttacttaatctgagcaagaaagcaaatagcaatttctaaagctttaatttaaggaggcttctctattcagtcagctcataatttgtagtttttaagtcccctaaaatatcacctattctggatttgctgataattgagagttcattctgattttcctttatatgcaaatcttccatgagcaccaactaatgactttttaaaggtctctttgtggacattgcagagaaagtaagaatgtcaccaagtgtaattgttatgctgaataccactattcatgccatcgttaaaaggtccgtttaaagggggtgagagacaaaagctaagcttgactggatggaggagcctttccgtgccactgcggaacccctcgcaggggtgggtagtgagggtgagtaaattgttctgccctcccctgagttcccaggctccttgagtcgcacgtgctcttctagagactgatgggaacgctcagcttgcttcactctcagaccttctctccccgcccagcgcggacgggctccgggctaggagctcgcagagggacgggctgtgtcgcctcgcctctccctgcctctgtgtaggaattccccgccgctgaggtcaggagggcgggagtgacacaggagccgtggctgcctggactcctgggctgccccaggagccgaggacagccaggtggaggcggctacggctcggcccgaacccaccacggcctcccctgcagggacctgtgtccagcctccacggccctgcagctgcattcgcctcagcctctcgtgctgggatccctgggcccttctagattcccatcacgcagggtcaaaaatgcccccacccgtgcacgctcaccgtgagaaacccactcccatgccgtgcactgatcgcccggcgtgctgcccggactccagccctgctgcctcggcctttccattctgcaccgcagggaaggcccaggcgtcgcgcggccagcccctggggacaccttcaggctgctcgagagggttccagctgccaggtcaggagcagagcacagccaccgcgccctccaaggacaccaaggcacgtcccgctgtccccccagcgcgtggccagttccccgcgactctttaagcagttctgctggcggtggcccccacacctgcctgggcccacagctcacccaggtcgagggaccctcgtgtcagctccctgccacacctgtggtttgctttctccaaataggaaactgttggagaaatgttcctcttagtatgaaatcagctttccattttattgcctttcttaaaaatctgtaatttttactttgacagaatggaatataaatggctcagaagaagcttaaccatcaataaatgtggagttgaaaaatgcaatggacatattctctagaaaaactgcaaatattattgatattttcttgcttgcctgctttctgtattatattctcatgtacatcttgaattaatgttccaagtaataaagaagaaaggtaaagatggcaacgtaattatgaccaagttctgttcagagccctcgaagatcaatttactttttttgctcttaagtacagtactttaatatgagctttagtgagcatatttatattcattttgaggcggtcatacaatgaaattaaaaatcattctccattcagtgacttttaatttagattttgcataccaattacaactctgcctctgcccccgccccccaaaaaaccctacatttcatcttaagttcatttcttgaaagtatctttgtcacaaactaaaaaactaatgatacaatactggaatttaaaaaacaagatgtaattgggccataatgacaggattattgcctggtaattttcccactattttaagctttgtgtttgacctgcatgctagttggatatttatttgtgtacatcgggttttgaggagttcatagtttttctaacagaaatcactgaatgttacatatgtttgtatgagtctttatttattataaatatgataaacaatcacctaaccaaatgtcttagatgttgttctttctggaagcatattttgtccttccaaagtttcttacaagctgtgagtgtaggataatgatattcaaagagaatcagtaccttttctatttttttgatgaccaactaaaatttctagaagaatttctgttaggaccatagacaaccatggagtgaggagaaggagtgtgatgtcgggcctgtaaaaacctgcttaaaaaacaacccacacattcacctttcttcgtgtacctgctgagctagccactggcggtgtggaacatgaggccttcctgctctcaccgtaagcctggttgcgctgcctacacaaagactaatgcaccaggctacctccaaaagcattagagagcaatgtggtttttatgaaagtcttttttcggggggaatgccaaagagagaaccacataatacatccttcactgattcatttaaacaaaacaaaacaaaaaaagttgagtgcttactatgtgccagcgcagcaaagcttcctaaaaaatcctttaaaaacagacactatgcggccacacagtcattttcaatttaccaaatccctcaaagacttccccagagcctcgcccggtgaacctgaatcaatgtgtacagccacggaaggcctgaggggtgaaggaggttttcactaccgtcgggaaacaagcaggtctagaaaaggatgggaaccttgccacacatggacaccatcctgcaaactttatgttccttctaaccatatatccttaccttctactcctctctttaataacctgactctgaggtcagggtacagtttggaacagtaaaatccagcactgatggcagacttattgaggttgctaaatggcaaaaagagtgctgtttaggcttaatgctctctcttagctaatgaaacagtgaagaactgcaatccaatctcagattttccaccatcaacataaccctcctgcagaagagtaggaatgtcagcttcatcagtgctactaacatgctttgcatcctgggaagatcccaaggagagtctccctctctgggctacctccaaatactgtccatcaggtctctcctgaaatttctaagagtattttttttccaaatctttgctaggagctgcaatgtatatgatttttgctaaatctttgctaaggaccacgtgatgatatgtatatcttgcttataaacccaaccaaagcgcattagagaccatttgtcctgaagctacctaccaactagatttgcgagtccacccaaatgtgtatgacatatggtcagggaggatgatacatcacctgttgcatttcccatcatgaggactgcctaataggtctagtcttgttctaatcttaatagtcctgtgagatccaacagcaatgagctgaaagctagggtttgtttgtttgtttgttgtttgttttaatgtaggtattgttactaaatgtaaattccatgaaggcagggacttttgtcttttttttcactgctttatcaacagctcagcaattgttcttagcacttcctgagattaataaatatttgctgaatgggtggatggagggagagtgtattggttttctattgtcacaaatttagccgcttaggacaacacccacatattatctcacagttctgcagatcagaaatccagcagactcagctatgtaatatgattagaatctaataaggggatcaaagtgtcagttgccctgtgttccctgtagagcttctgaggaagaatccacttctaggctcatcccaggtgttgatagaaatcagttctaatggttgcaggactgaggtctccatttcctggctggttggcagcagtggggagctctcaactgctagaggcggcccacattccctggcccatgaccatctcatcttcaaagccagcaatggagggtttcctatcactcggcctccccttctgccgcatctcatctgccttccttttctgctttcaagggctcgtgtgattcccacccagataaagaagagtattgctcaagtagagtgttaactaatctaactttgttccactttttttttgttacaaggcatggaactatgtggaataatcccttgttttaaggtcagcagattagtaaccttaattctgtttgcaaagtcctttcacaacaataccttgattcatgtttgactgaataacaaggggacggaaatattggaggaacatctgtagaattgaggttttggaatgaagtcatcaaaaaattgatgcctggatgaccatgactgggagcttgaagtacatgttcaagaggatacaaaattaactgccaacatttagtgaaggtagcgcagctcgacactgtattatttttggaattgttattcttactttacagatgaaaaagctgagcattggatcaaatgacttgcccaaggtcacagggcaggaatgaaccaaagccagcacccaagaaataagcaggtcctccttccaaacctgagtggcaggtactctggaagtgtaaattggattgccagaaatagcatttctaaggtaattctgatcaaaagatttcttttatttaaggtactgaagtaaatggaagtttcattgatccgatttaacaactattatatgctggtagatcaaagtagctgttgctgatcttcacaaattcttatgcattatgaagcaaaaatgttttcatatcatcaatttctattgtggagtagtgttcaataatatcttgagaaaaactctaaacacagaaaactatcagcaagttcacctaattaaaaacatcaaacagaatcttctaactttgttccactttttgtgttagaaggcatgtaaccacatggtgtgcattcaatttttttttaatcccagccaaattccttctcagagttatggataaaatctgtgtatgtagctgtcttcgtccatttttgtgttgctataacagaatagctcagactgggtaatttatttttaaaaagaagtttatttggctcatgattctggaggcagggaagtccaagattgcacagaccatttgatgagggtcttgtgctgcttcaacttcaagttgaaaaggatgtaggcaggtgcaaagagaccagagtctctgtgggtctcatggggaaaaatagtaactcgcatgtgattcatttgtacaaattttagtaagatatagagcaagcttacaccttactcttttaggcaatttaatttacacaatgttttcatttctaaatgtaatcctttggtaaaagaccatttgttttaggtgcaattgttcacaatctcttttgctaacaaatcacatagttctcccaacaattctcccaaatataataggtaaacacattaaaaattgctcttgccatgtatacttcaattaccttgccaaattgatatttcaagttaaacacggttgtatattatacagagaagagtgttctcctagtcttaacaataactcattgaacaagtactcttatactatttatgaagtaattcaaaataaggcactaatctacatttactagtacattatggagaagtacttctatgaccctattcctgaaaatcagcctacattttcttagaaatttctacctacttttactagaaatttattgcactagtaagtttttcttgatttcccatattaaaaaaaaataattcattgcaaataaaacctttcctgagtaataatcacttggcatgtaaatgattttagtattaatataattctctctaaataaataacttccaggcccaatgcataatgtaccaagcacacctattaaaatgatagttttgtaatgtgagaatttccattataaaaacctgcgagacacaatctagcacatttaaagaatgatcacttttagattgtaactggaagataaattctaattactatttaatttcttggttgaacatctttggcatgtacaacataaaattgactctgaaattatgcagttaatattatcagcacttagctattccatttgaagctgcaaaggtttaatttgcttggctcaaagaaatattcaaccagaaaaaaaactgcttaaagtttgggaaatttaaaaagtggctatcgatatagttaactaatctataataagctatgttcagtgaaatggctcaacattgggtcattgaaaaaaatggtacattctttagaaagtatgctatttgaggtgttctagaccaggaagataaacatgtttttagaattctattatcaaagctatgggttaatatccaacattgtgacgtgatcctgtgactttagtcaaatcagtcatggaaagttagaaatctcctcccttaaacattgatgcattcttagaattgcttcttgcctaaactatgtttttcaaaaatgtaaatctcagagagttgttcttccagtcacattgctggagtagagatttataatttttaaaatttttaatgagattattgacttgttaatttgtagattattgacttattaatttgtttcaagttcttttgtgttaactgtcttaaaaatggctaacagttatttagtgctttttataggctagattctggattaagctgttttcatgaatcatctcatttaatcctcacaaacccaggaggaagaaagtatccttcctctaatttaacagatgagaaaatgaatgcagagagataaagtaattttcaaactgtcaatcagttagtaaaagggaacttataggattattcaaatggaaagagagataaaaagtgataacttgtacagttttctccatccataaatactgagtgcttcaactgcacctaatggggtatttaattacactgttatagacaaatcattcagctatattggtttaatcttccagtgtttaaactagcagtaataaactaataacattcctaaacttccagtttcttccaaagttatttttattcatgttactaaattaaaaaaagtagtgttcaatactaattatttactgtgatctgttttttaaaacatctgagtggcattattcttggatgaaaagtaaatccaaattcagcctttatgtaatagtatgacatttttacttttggagtttataacagagtttaataaatgtataacatgagcaataatcaagatttttattgcatatgtttattaaagctcacttatagctagttaatagagtatgcgtagattttgctgagttaataaatccaatgcaaagtaccacttgtacatgatgatgtagatagcttcactataggtatcctgaagcatggagttcttcatgcacaatagtttgtcctttgtgtgaaaagataatttgctgaccatttgtgcacggaagtcctcatcatcagcaggacttaacttgagatgattcaagccaattgcaagaaatgctctttagaaagaagaatttacaagacttgctcattaaactatgtaaattaattgtaacttgaaaagaggaaaaaaggctctagtttcacttttttaagtttggggaagatgagttgcaaataatgatcaagaagaaagtcattctgtctaaattagggcatggtggatcttcagcttgaatgtttatcttgagagaatgagaaagagaaacagagagagggagagaaatagataaaggaaaaagaaggtcagtgaatatgatgaaaagcacaagggcattttagtaggtagagagattaaaacctaaaaccatgagggttctttcatattttttaaaatctaatagaaatatgatgagaaagagaaagatgttgaagatatacagaaagaatatcaagtagagccattgatcttaactataaatataaggcagagatgcattgaaaataaaggccacaaactgcaaatgaatgaaaacacttagtatgtcacaaacatgacaaacaaaaagctcctggaatttttcagactgagatggccttatttcattggtggtggatcccagttgagtgtcaaccctcaacgagtgggcagagacccctgcctgaatctcctgagtcacacggcgcacactgcatcccattaggactgatactgttttgcaacagcttaactaatacaatttcaatatttaaccaaaatctgctttcctgtaacgttcccactgggggcttcatttggctgtctggaccgggcctctctgcttcatgagtttccatagatttcttggtgaatattcttctcgtgcatcctgttctttgatgtattgattttcaacaatacatcaaaatcaggtacaaggcagaccttttctttgttggattccaaatgtacaaggactcaatcttgattacatcctaatgctgacgtttctagacaatatttatttgctgttctttgtttccctttgtttctcttgctctataaatttctccaaaatcctaacatgttgtttgaaatttggttgtttcttcttatgcaagtttgcatttcaagttattttatagcctagatatataggaatcctgctttcctccgaatgtgtaaaaattaataactgttaatagtcctctgctatctaagttttaggtttgacataagggaggtggtttgaggctgaagccgtctgatgtggtttggctttgtgtccctacccaaatctcatgtcaaattgtaatcacccatgttggaggaggggccaggtgggaggtgattggatcactggggtagatttccttctttctgttctcatgatgatgagtgagctctcacgagttctggttgtttaaaaatctgtagaaccacccactttgctctcttcctcctgctccaaccgtgtagaaagtgtctgcttgcccttcgccttctaccattgtaagtttcctgaggcctccccagccatgcttcctgcacagcctgcagaaccgtgagccaattatacctcttctctttcccttttttttttttttttttttttttgacggtgttgctctgttgcccaggctggaacgcagtggtgcagtctcctcacactgcagcctctgcctcccaggttcaagcaatctcaggcctcagtccctgagtagctgggaccacaggcatgtgccaccacacccagctaattttttttttgtctttttagtagacacagggttttgccatgttggtctcgaactcctggcctcaagtgatccacccacctcaacctctcaaagtgctgggattataggcgtgagccactgtgcctggctgaacctcttttccttacaaattacgcagtcttgggtagttcttcatattaagttgttgcgccaacctatagcaatgtgagaacagactaataacactgtccatacaaatacaggaaatgtagatctcttgtacatttggaatccaacaaagaaaaggtctgccttgtacctgatctttatgtattcatcaaaatcaatacatcaaagaacaggatgcacaagaataatattcaccaagaaacctacaaaagcccataaagtcgcttgtttcttcaggataaaactttagatcactgttttggcatgaaagcaaagtatcaccttggcagaagactgtgtcaaccctccagtaggcatgctgacatcttgattgttttctgctcttttgcttctcatcattttattggacagggtatagcccagctagctggattcagtgtcatatttcatattggcaaagaaaacttgtgattgaaagtaaggtttctctaccagacaacttttacaaagaatccaatggtgtactctttcaataatttatttcccttgctccccaaaagtcaatcatttaccaatcttattacttgttcatttgcaactgtgtacccaccccactgttgccagctgcccctactatgctgtaacagtgagttcagagcatcactatcacacgttgtctatgatagcaaattcttctttgttctccatgcagcaaaaattacatctgttgtctcatctcgatttgaaaaacctctcagcaattctaggaacaggtagccaccagtccaaaagaatgctggacaaaattgtagtagtagtttgtggttttcctttcttccttttgaaatatttctatctttataatctcttaacattatctgagtcctatctaaggcattttagtaagtagagcattttagtaggaaagagaaaaatcaacttcctaagcacctcctcccctcaatgctttgaagtctcagcacatatgctcatgggacaaatgacacttttgtaaaagaagaaacagaaaacctgccaattgactgaatattgggaataaacaagcagggatttccactttttaaagaattcttcactttgttaagaatttacatgatgactctttctgtggtactatagagcctcctccacagtgaaattgagaaggagattgggacttgatatgcaaactcaagtatataactggttcattagagagaaatgaatgataaatatcagtttcatggagatggcaggaaaatcacaagatagagcttgaccactgagatttctagagcttgaccactgagatttctagagcttggccactgagatttctagtgtggagatactatatgctggtagcaattgtacaaagatacatttatggatagaaatccaggggaaagaagaggtagttcatcttcacagattccaactgagaaagggcagaggaaaacatggcaatgtctcctgaaggctgctaggccactgtttcactttgtgcagattcatgacgccagtctgggaagagttcgcttcctggtacctggtacagatggggttatcccacctcttctgacacacatgccatagaaaaaaccattcattcatctatttcattatttttactgaatattttatatgtgccaaccactgtgctaagcagcaaatatagaatagtgcatgtaaattaataaaagcacaaatatatataattacactcactggagttcaaagtgccagtgacaataatgatggtgatagcagccaacagtcactctgcatcccctccacatgagacactgtgctaagtgcctttatctgcagtatctgaacaaacttcaggccaggcaggagagcacagctcaatttgcttcgttcttgtctgagactcccagtggtcacattgctgtcttcaccacagagccccttgtagagccaaaataccatggtgagggagggtggatacaaaacattcacattgcacaccttcaccttcctctagcagcccctgggctgtcaccgtggcagcactttgatgctcagcccctcagacctgttgtgttggcaggaaaccagctaactgaagcagagtaaatgaagcaaacaccgcctcttgaaagggccatggtatggctgatgaggagacccaggatcagttactgctgtcttcatagcttgcatgaccacaggccagtcattcagtccgtctgtgtgtttcttcatctagcaagtaggaaggagaaacactcacatgtcttcaaatccacatgtgtcaaatccaaatatgctcttccctcttcctgctggacattctgtgatgcagattctccttccgcttcttacatctgtttttctttccttcaacctcagtgcatgttgtcatttatagtcaagcaattcattcctatttcttctcaccacccactttgtgcagagccttttacgctagaacctgcccaagaacaggaagacctgggttccattgcagataaccccagggttccttccctcccacactgtagttaatcccaattgcctggcaccaactcatacctgagctgtggaatcaataatttctggattttatgatccccttgtaaacgctggcaaaatcaatgagatttccataccagagggtggggaacaatgaagtagatgctattgataattagttcttttacagaaatgcaaggtaagtacagggtgtttatgccacttttatgcataatgaggcatttatacaaacaacatccacacagctagttgaactgcctggagcaaaataatattcaaccttcaaatttaataactgcataaacttagaactgataggatgctttctgctctggttttgaagtgcctaattaagtacattcaaggaggttattttgttttgttttgcttttagccccctccctttgaaacccacttgtggtcagtgttagagagctgatggttttcttaatgtgtcattgttatagaacatgcctgtgattctgtattcttcagtgtaatacctgtgtttctgtgaaataatctgtgagatttcatgctaagcattgctcttgtcttttctatttttattctaagtatattaactgatttccttggagggacgtgcttgcaagcttgggtgtatcttggtttatctaataaacatgctcctggcacatattgtgtaaatctaattttaacaaattgaatcatatatttaaatgcctgaggggcactcattttaagaaattaatcatattctgaattttcagggaatttttacacccaaattttattttctgataatctaggttttcacttgatttgctttatttaggtgacactgtaccaaattattaaattcattgaggaatttttaaaagcaaggcattgagggaaaggattctgggaagatggtagagtaaaaagcaccaggcatctgcctccctacctagacaacaattgcattgacagaatctgtctgatggaactttttttgaagtctggcatctattctaaggattgaaacattcacagaaaggcttagaaggtaaattgtggttaatttcagtcatataagctggtagcaaagtggcagctacccatcccccagtcctatggcagggagctgtgcacctgttcctagagtagcttgcacacagcttgtgggagccagtgcaggtgaaaaggaccctttcctccaaaacttggggacctgtgttctgattgctgcttctgaatgtggagctgcaaacacagagggggcaactattgctgtatccctccctcatttgttgcaagcccctccccctctggttgaagcaatttccagggaacttatatggccagtaaccccctttttctttttttctccttccccctcatttttctcctttgcttcttttggaaaccaggcatttaaaagcaatcacatgtgcaaaggcaactagaaagtcactatgcatgcccaaggaaaggcacaggcctaaagaagacctgagaagaccttaggtttacacctcaggctggtcaacagcacagatacaacagagaacaatttttttaaaagaaaaacctggggaagggggtagtctgatttccagagttactatgtcattagatcaaatatccagttttcaacaaaaatcacaaggcatacaaagaaacaggaaagtattgtccattcaaagtaaaaaataaatcaatggaaactgtccctaagaaacaacagatagtagacattgctagacaaaggctttaaaaacaactatcttaaagatactcaaagaactaaaagaacatggggaggaagtcaagaaaacaatgtatgaacaaaatgaagataccaataaaaaaatttaaaaagtctaaaaagaaaccagcttcacaactggaactaaaaaggacggtaactgagagaaaaaatttatcaggatacaaaagcatgttagagtggacagaaacatcatctgtgaatttaaagataacacaataaattacagaatctgaggaatagaaagaaaaagcatttctcttttgaaaaagtggacaaagagtgagggacctgtggaacatcataaagtggaccagcatgttcattgtgggattctagggagaagagagagagaaagcggtagagaagttattcaaagaaataatggctgaaaactttctaaatatgatgaaagccatgaatgtaaacatccaagaagttcaacaaactctaagtaggatgaactcaaagagaaccacactgagacatattataatcaaaccatcaaaagacaagcaatcttgaaagcagtgagagaaaaaggactcatcacgtatacagaatactccaaagattaacaactgacttctcattagaaactatggaggccagaagacaatgggctaatgtatttagcaaggaaaaacaaaacaaacaaacaaaaaaaattgtcaaccaagaacccaatatccagcaaaactgtatatcaaaagcaaaggggaaattgagacattcccaggtaagcaaaagccaagggagtttgctactgctacacccaccctgcagaaaacactaaaaggaggccacagattgaaatgactagaaattagcttgaagccatatgtagaaataaaggtctcggtaaaggtaaatacatgagcaattatagaaactagtattgtttcactttggtgtgtaactccacattttgttttctacattatttaacctattaatgcataaaaaatacaagttcatgtttttggacatacatacagtgtattaagacgtaattttgtaatatcgataactgatcccaacactttgggaggccgaggtgggcagattatttgaggccaggagtttgagaccagcctggccaatatggcaaaaccctgtctctactaaaaatataaaaactagttgggcatggtggtgcgcccctgtaatcccagctacttgggtggctgaggcacaagaattgcttgaacccaggaggtggaggtttcagtgagtcgagattgtgccactgcacttcagcctgggtgagagaactgagactctgtctcaaaaacaacaacaacaacaaaacctgaaaagggtgagggtgctgttgcataggagcattttttgtgtgtgttattgaagttaagttggtatcaattcaaattggagtcttataacattaggatattaaacgtaatccttagggtgaccacaaagaaaatagctatagaatatttacaaaaagaaatgagaagcaaattaattcactacacagataaagactaagaatgaagactgaattctaacatccatatatatatgcatgttattcagtcttgggaataaaggaaatcctatttggagtgtcatgaatgaacctggaggacattatactaagtaaaataagccagacacagaaagaaaaatattacatgatctcacttatatgatgaatctaaaataatcaaacttaaagaagcagagaatggaatggtggttcccaggggctgtggggtgggagaaatagggagatgttggctaaaaggtacaaaatttcagttataagatgaataaattctggagagctaatgtacagcatggtgaccacagttaattatactctattgcatactagaaatttcctgagagtagatatcaaatgttctcagcatcaaaaaaaaaaaaaaggtaataatgtgaggtgatggatatgctaattagcttgattatgataatcatttcacaatgtattcatatatcaaaacatcatgtgtacaacttaagtatatacaatttttatttgtcaattatatctcaacaaagctggaaataaaagaggaagcttctttaaagatgtgtctatgatttcccagtgacatggatcatttaggattgtaatcaaccattgaaactgttagttagccaactaaatctcttatatacaaatagaaaccttgaatctcataaaatcaatacttaatgaatacctactgcatgctgagttccagagacacatgaataaaggcgatgtaggctgtgaccttattatactgggctggattctgtggggtgggactgagtagaggggatgactcgctttatctgggggcatcggggaaggctttctaggggaccagtctggatcttggaaaaagcagagagctactttatgctttaatctgcattaaaattgtccagtggtaaagcttgatatgctgtgtggatggtaaatgtttcttacttaatcagaaaagcatcctaagagtgatggattctaaattgatttttactgcagtggatgcatacaaaatgaatgaagggaattagtctatagttcccccacgcccctaccctaagagatagtttgtgtgaaagattatacatgagtgaggaaacaacagggccaaacctgaaggatgaaaactgattgacggacttgagttgaaaataaaaacaagcaggacgaggctgcgattgcaatgtgaagtcagcatgcatctactgtaatttattcaaatccaaccaggcccagagagcaggccaggcccccttctgtccactccaccttccacgctactcttgggtccacactctggagagaccatgagatcaaacataagaatcctgcattcctctgtcagtttcagctcttcacctgcctctgaagtgtagtaattacgtcatggccctccagtgcaaccacgccctaacagaagcgagccacttcagctgctgcatctattccaatgctggaagaaaagctattcatgcctatgggcatttggggcctataggaccttaatccctgcttgccctcccaagctgagatatagttacacttctagaggacagggaaacttcctgaggggtgtattagtgcattctcacacagttgtaaggaaatacctgagactgtgtaatttataaagaaacaaggtttgatgagctcatggttctgcaggctgtacaggaagcatagcggcttctgctcctgggcttctgcctcaggaaacttacaatcgtggcaaaaggcgaaggagaagcaggcccgtcttacatggttggagcaggagcgagattagggagcagatactacgcactattaaatgaccagatctcagatgaactcatacactatcgtgaggacagtactgagggggaaatccgcagccatgatccaatcacctcccaccaggccccacctccaacactggggaccacaattcgacgtgatatttgggcagggaaataggtccaaactgtatcaaatgggggggatgtgtctgggtggaagtgagtcttttatatatttggagtgattgagagagtcagaacaacagtgtgtgcagagcgctcttggttgtagagaccagcgacagcagtccaggtatgacggaaatgaaaatgttagccatggcttagcaaaggtcttttgaaagaaacgagtgtagatgtttgctcatggcactatttctagggcttaggtcaggggctcaagggccattctcaagggtttgcaccaggataatggagaggaggaaaaagcctgagaagttggcaccttaaaatcagcaagactgaagagttcattaagtatgggctgcagagaagaagatgattcaaaaatgactgagaagcttgggtgttaggatggtgatgccgttttcagcactggagaacacaggagacgcaggtggtgcattgagtcctggacgtggtgagtcggaggtgctgcagggatccccagacgagcactcacagaagcaagttggaagggcaggctctccatgcctgtcccgtggccagcatcatttctccactccctgtcaccctcggaggaagagtttcatccaaaagctgggtgagcatgcccaggtacagctaggaaagtggaaaatcagaaagccaggagaggaaaatcagaagttgaataaaaggaggatgaattcagggaacactcatcccacactgtctagcgttacccttcagggtccctgcaaaccatctaggaaagagcatcacagtggaactcccagtcacacttgtgaatgtggaacccttcttggtgccagcaacaagtacagaattactgagtggcccctgtgctgtggcttcagctcactgctcaagggcaggggccacctagagactgaggccgcctggctccagccactggggaggtttcctaccccagcactaaggaggctggtggtgagggctcccaggaaatcagaaaggtcatgaaaggagtggaggttttgagattgcaaaagaaaatttctggccaggtccagtagctcatgcctgtaatcccagcactttgggaggccaaggtaggtggatcacttgagatcaggagttggagaccagcctggccaacatggtgaaaccccatctctactaaaaatacaaaatgagctgggcttggtggtgggaacctgtaatcccagctactcaggaggctgtggcaggagaattgcttgaacctgggaggcggaggtggcagtgagccgagattgcaccactgcactccagactgggtgacaagaacgagactctgtctcaaaaaaaaaaaaaaaaagtttctaatgaaaaagggaggcaaggtcactatgtggagattagataatcaaactctgaaactgttcagctgggtagaagaaagcaagatcatggatgtgacaatgtgttgatgttcatgcttgttgtcttacctaatgtacaggcagagaattgacaacatggctgttcttaaaattaggttgaggtttaagagaactaagcctgtaagagtgatgaaggctgacttaagcattccgtcttaactgggacatagaaaacctcgagtctgctattgactctgtcagtaattcattatgtggcattatatatatagtctctgtgcattaggggagaaaccgaggtgaaaacaggaattatttcctcagagcacactgactgccaaggtgtttatacactgcacaaggaagaggaaaataatacttgccacctacctacccattaggggtgacgtctggagagaggcattcaattttcggatgaacgggtttatgaatagcagcgtatcacctgcttctgatctgtcttatttttgcatcaattcacctcctgagtgatagtggcaatggtgccacttgtcctttgagtcactgattccatgtctcctcacccagggcatgtggaagggaaggtttgagagaagtgaggccccattctttaaggtgtgatagaacattactaattaaacacaaaaaaatattttttaagcaaagttactgcatggctaatgtattttatttatagatccccgtttctgggtcctttaaaggaaaactgttattcatgttaggctgatcctaccttacctatgtcacttgctaacttagtaaagaactctttttaaaaattcagagagtgtcatatttattttccatacatcttgtcatttactatatatgtttgtaaacaaatatgttccatttcttaggagacatctggtttctaactggtttgacttaataaggtaacagaagttccatgttcaatctgccttcaagggttgcattctcttagtgatttaatgcttcaaatagtgtttcattcaagggcagattctgattctctatttctctcctctcacctcctctttccttctcagacatgtgggaagtgacccttgcatagagactcggaaaaactctgaaaacagaacacataaagctttaggatattttcaatgacccattcctgttctttcctttacttgaaaaagttcagaaagtccaggtctaggtcacattctaagagagctcacccagagtggactctgcttaaccaaagccttcaaggggctctttcaggcatgagcaggaaaatacatccacaagagtccccgctgcatgcagatcccagggccatctgctgtgctctcagagatgctcattgttgtcatttaactgcgagggccacagaggggacaactgcagattcctgctctacagctagactcctggggcccaatacaggccacagctcttcgcagccatgagatatgcgagcacgctgcctaactcatctgtaccaccatgttctcgtctgtgaaacttgggtattaacagtacttacctcatgggtttgtttcaaggattgagtcaatattagcaaagcattcaggacaccacctggcacccagtgagtgtgacgtaaatagtaaagaaattggcttttcctggcacgatgatcaagtgattggtgcccagcagctctaagcaaactgtctttgaagggagagaagaagccccagcagagattgttcagaacagctcaacgtcatgcaggagttgctcagctacacccatctcgggatgatggagactccaagtgttacgtattttgcaagcttcataaatctgaccagatatagacaggagattgtaacctgtgctttttgtttatgaatcttgtattgagttgttgaagatggttaggacaatttaatgttgcataaaaaccacttcttgtaacatcttaatagtgagaataggagggtcaaggcaagaaaagtgctgagaaaacaatccccccaaaaagtttctctcttaatttcaacatcattttatgtatttttgttgttgttgttgttggtttgttttatagctttaaatgttaggattacattttggggcttattattcaaatcaaatatctggcaccattcattttctgcttccacatttgaaagaccaaatgttcatcatttctggtgtcggttcagcctctggcctcctttctaagacacattttgtagagtattagttttcccattcatagcacgagaaaaataatacattccttttttataatagaaatgtgatttgaggttgcttacagagtaggtagaggtttagggggaaaggctgtgttttgtgtggctctaggatgaattatatgaaataagataagagggaaagctatagtgggtcacttgaatactgacctagtattcaactgtttttgaaaagaagttctgctctgctgtaactcctgctggccttccagaagcatcagctgtgtcacaccacaagtcttaaaggatctcccttgtttccactgcacatctgcccccatgaataaactaagtgggcaacatggtcatggttatgtgttcttagctactctgtcctcagtgtgtgaaatgcccacctttaggggcgctgttggggtgaggcattttagctcccaaaggatcctattagagtttgaaggccctgagaccagacagccacactgcacagaggggcagcctggacccacgggacatgagatgagttaatccacagttagccaagaggttaccgcagaggtagatattcacttattcaaaatttaagtgcctactatgtgcaaggcagaaatctgcgtctactttctcctcatcagcaaaagtagttctacttttgtttttggtttttctttttaagaaaaaaaaaatactgtggacttctgtataatactcattttagccaaagaattctgcaactgaagagtttgagtcagtctccatggcatccctggatgagttctggtcatgaaggagctcaaatgatccttgtcagccgggggaataagctagacccaggccctcccatgcctggcctcattcctttttcaagggaacaatgccatacctcactagaccctagctatacattcctccagccaaatgccaggaagcatctgaccatgagactttaagagcaaaatgttgcttaaagaaaaaaatgggagctgttctaaattcaagagctaatagatatactcttccattttctatggtcaaagtcataacataacaacatcactacaaatttaagaaatagctacagttaattcagtagatattgtagtgaatgaatgcctgaaatatggtttgagggtcacatatttaacctcatcaaacctcaatttattcatcaaaaaatagaagtgatcattattttgttgtgaagaacaaatattataaaggaccttataaaccataaagcattatacatagtttatccttctcttttccattccttaagcaggactgtcagtgcaattgccttatattttagtgctatggagtacccttatctttttgctaaatattacaaatccttttgcttacaaattagtctgtcacttctattcgatggattatctgtctacctcggggcttctgtgatgcacagagtcatgggctcactctctttggctcatcttgtaggtttgcaatcactcttacaactgtcacttccagccgatccaggactgctgcggcctctctgctctgaaatacacctagtatgtgaatttcacatcacttctcagtcataaaacagacccatcagaagctcattttcctaagtttattttaaatttatagagcattcatttcatccttctcggtaatcttttttttttttttttttttgagacagagtctccgtctgtcacccaagctggagtgcagtggcacgatctcagctcactgcaagctccgcctcctgggttcacaccattctgcctcagcctcccgagtagctgggaccacaggtacccgccaccatgcctggctaattttttgtatttttagtagacacggggtttcaccatgttagccaggatggtctcaatctcctaaccttgtgatctgcctgcctcggcctcccaaagtgctgggattacaggtgtgagccaccacgcctggccggtgatctttttctctttctcttttttcttttcacttgctgctattctatacatgcggaggagtttttggaaggaaaagagggcgccttattaatggtcattttctactaatggtgattttgatactattagatacctactatgggcattgaaattggtctctagttccattgagaagagtagaaaaatttctagtataagtacattcataatgtttagataatatcttgagaaaaaaatagacaaattcacaagttcttctttgacttgatagatttctgagttctcatgtgtttgtccatcttcattctgctttaacgcatttacacacacacacacacacttccttttctatttgttcagctttactgagatgtaattgtgctatagttggtttgtgtgacccctccgaatcgcttgttgaaatttgatccccactgttagaggtggagcctaccgggcggtgtttgggtggtacaggcagatccctcgcgaatggcttggtgccctgcccatggtaatgggtgagttctcaccctgctgttcccacaagagctgtttgtttaaaaaagcctggcacctccccctcgctctctcgcttcctctcttgccacatgatcccttcgcaacagctccccttcgacttccactgtgaccagatgcagccccagaagtagacactggtgccacgcttcctgtgtagcctgcagaatcggaagacaaaaaacccctttccttcataaattacccaaccccaggtattattttatagcaacacaagtggactaagacaaattggtatatgaaaaccacacataattaatgtgtacaatttggtgagtttggaggtatacatacatttatgttaccatcaccacaacaaggagacagacacatccatcatctccagaagtttccttttgcgtgtctgtgtgagggaagaaaacttaacataagactactgatacagctccgaagactggagaaacaccagggtcctttgtctcatgccaatgctattaacgacaaggacacccgtggagtggttttaaggagcggagagtttaacaggcaagaaacaagaaagaagaaaacagctccccggtacagaaggagctgggctcctaacggagaaaaaccccgtgtgcccaggaaaaacagttgtttatacctggaggctggaggaggcggtgtctgatttgcttagggcccaggggattggcttgaccaggtgtgtcattcacatagccaacctggtcctcccaccctagccttttaatatgcaaatgcgggtcggcatgatgtcctgcacacgtggtgttatttggaggcagccatgacagctgtggtgacaaggagaagagggcgggaaccgccatgtcgggtggacctggtttttagctgctggcatttacatatcaatgttgccagcctggtttttcaagctgctttctgttagaaaggaaatggtttggggggtcgctttttattataggaaaattccaccaagaactctcaccctttctagctgcctaaaaattatttcttaataactcctatattactaccctcctaacagaattttaagtgcacaataccttatcgttaactctaggcaccgtgttgtacaggagatctctggaacttatcttgtgtaactgtaatttgataatccattgaacagcaactctgcatatgccccctctccatccgctagtaaccagcgttctattgtctacttctgtacatctgactatttttagatgctccatataagaggaatcactcagtatttcttcttctctgactatttcacctagcataatgtcttccagatctgtccgtgttgtcacaaatggtagtatttccttctttttaaagccaggatagtattctactatatgcatataccacatttcattcatcagtggacaattgggttgcttgcacatcttggccactgtgaaggatgctgcagggaacatgggagtgcagatgtttcttcgagatcacaatttcagttcttttgggtatatacccagcagtaagattgcctgcttatatggtattctattttaattttttgaggaacctccatgctgctttccatagtggcagcagtatgtattctttggagaaatgtctattcaagtcctttgcatgttgtaattgtgttttttgggagttttcactagtgagttgtaggagctctttgtatatttcagaaattaactccttatcacatacatggtttgcaaatatgttctcccattgcataggtggcctttccactctgttgattgtttcctttgctgtgcagaaattgatgctgggggaaaaaggggatttgaagtataggccaacttcagaacaatttgaccaggacttgctaagtttttttttaaattaggaaaatacatagaatgtgacttaaaaaaataatcaattacctaagaccttgtctactgggtcttaagttgaatttctaaattctggagccaactatgtgaccttgggcacgtgaacaaaagttaattctataaactagtttaaatcctgtaggaatataacattattttattttattttatttttcttaagaactttttggaaaagaggctgaggaggttaggaaagagcctctgattttatgaagaaatgtccagcatttccccaggaatgggattccacacaagaacaccagctggagcagtgccgtagagtcaaaggaaggaagaggctgcagttcggcaccagtggggaagccaagggcatcttgcatgctggcaccttcgagaggccgtacagctggagggtgcactttgcattgccccatgtaggctctgtaattaatatggctgtaaattttgaaaaactgttattctggcagtcaaaaataatcccctatatataggcatcatgtaaacttttaaaacgtctttcacatccttcaaaatgtataatctcatgaattacagtctcatgaaaatatagcaaataaatatttggaattataagagaggaaaaaataaagaagtgaaaaggatttgccctactccaaacaaagcaatgcaattgtgcaacggaaggataagtcataagaaaacagtagagcgttcagaaaaaactccaagagtgtatgtgggaatgtagaaattcaataaaggtgatattttaaatcagcaaggaaagactagattatttattaaatgaaattgagttaattgattctccatttagaagaaaataaagtcaggaggtatgtctcatagcagtctccagatacttttaaggatgtttaaagatttaggtgtaaaaatattaaatctataaaagtactagaagaaaatataattttgttaaataatttcagagtgaggaagccattttcaaccacagaacaggttctaggaagtataaggaaaagattgatgggtctgactatataatataaacttaaaactcacatacagtgaaaaaactcaatatagagctgcacagcaaacggcaaattggaacaacataatctcaacacatgcaacagtaaaggcttaatgcccagacctatgaaagacccctaaatagctataagaaaaagacacacaactcaatagaaacagcaattcagaaaagaagcatagtcaaaaacaatgaagaaatgagctacctcattaacagtaaattcaaaccgctatgaaatataacctccagtttttatgaaattccaaggaaatggacattcttgttaacagttgatgagaaggcaaataagcatgatgtttttgaaagataattagctttcttttaatactaagtgtgtataccattcaacccctaaactctactcctaggaaactatcccacaagaaataacaacacagatgtcaaaatagtaagaatttctgaattttctgaaatagtaaatatttctgtgcagcattttaatcaaatgatacatatgttctgccttaggaaaaaggagcacagtttattgtaacataaaacatgcacatatacatacaaacacttacacattgcagatcaaaatgagctgtctacatttatctgacagatggtctgtgtgtctgtacgtgtgtatatacatacaaaaacacttacgtatatcctagtaacagcataggaaaaagattggacgaacaggcacctaactgtgatgattctttgggggtcaggggattgctgggatgataaatttttatttcaaacaaagtatgccaaatgacgctttcatttataagataccaaaatacaatggcgttcaatttcactcagtagcatatgcaaagaattgtctcattaacctctgaatcaggcctttcaccttttgctggaatggctgaccttgagaccaaacactagaaccacccatggaacacctgttgaatacattaatccccctagatgagccttcccacttctgttcatttcacagaactaatttctatggcattttatttttacacaacattgaaaccaagattgtctttggtatttatgagggcatttacaaaaggaacagagcaaatgcggttgagacaggtcacaataattctctctgtctctctgacacccagtgtttcaagcttcaccttccttttacacatactcaattaaattaaaatacaacgtgcaaagaaagcaatggcgaaagaatctgaaagggcactgcagaggtgaaaatcaaataacctcatataaacctttcctattaagagtgaatatatttagatttttaaaaataaaaacccagaataattatgaaagcaaaatgccacagacccagatagacagggaaagaaaataaaggtgctgtaaatccacaaggcccatggtgttcacatttcttcttgttttgctcagctctgagctgctggcaggtgttgacccgaaggggagtctatccaggcacccaggtagcactgctggccaggtcagatgccactggagggagggtggaaacacaggtcaagtgctcttgagcccctccccatctctcaccccagctcttcatcgctaagtagctgggaactgactacgtagcatcaattacacacgtacaactctgaggagttgtcagactttagccctaatagtgccttcagtttttttatgagactatgtaaatgaatgccaacagggtcaatgaagtggcaagtgccatttctaacatttaacaaaagtggcgtcatttccagagctctgcccagctctgactctttctcctggagggtgcaaaaagaaaaacagaaacttttctcgaaggcatcatatttcagacaagtattgtttcaattatgacattttgtcaaattgtgaagtttaaaggacaaattgcctcggcctattcctgcttaagccttttcatgccacttatggaaaatagcctgtgcttttaatgggtattttgtcagttaatattgccatggagagagaacaagctgtagcttccttctgctgagacttgaagccccatgaaggacagacttgtctgttttgtccactgcttgtctctaggtctgccgcacaagtgtgtccttcacattcactattgttaaataagaatcttcaggtcgccttataactgcacaccctcaattggattaattcttattagtttccccttcctgggctatagaattaggttagtcatgacactgaagttgcaaaatgcttgacatagaaaagtgtgtatgctctctgtcatatatgaagaagtctttatctttacatttacagaaatagtttatcgtaaagtcttgtcatttgagtctcaccatgtcatcaggacacaatgtgccataacttccacacatgcttgtagctcagagtgcacagtttagcctgatgacagcctgctgattatttataaattaacagatccagtggaaatattatatcttttgtttggcagaaatatatattttaatatgtctcacttgtttttgtaatccatctcataacatgaactttagaatatgtactatgtatttttaaaggtatttctttgttccttgattgtggtttattatttttcaaacagcttcaaaatttccaatttccagaagatttttaaatttaaagtgtaattgttttaaaataccaaaattggtgagattattgaagaagatgattctctctactcaggaaagccacttaaaattggatgaaattgaggaagtacagcaaaagcttaattctcaggatattaatctaggctttctttggaacaagaagcagggctgagaaattgccctcagttgtaaatggaaaatgagtttaagcatcctcctaaagaatcataatttagttctagtcagaagtagctgagcaggagaaaacttgattacttaaaggcactaagtatattaggaaacgaaatacaaataccttcaaccagggccgctgctgcagtctggctgtgtaaggtctggtattctgatggaaactgataggctccattagagatgtctatcatgtagaaaatgaatttaggatgcctttgtcatttctcttgtctgtaggctgagcttttttaaaaattgagctatattcatgcaagttatataacttaatttactgctgaaatggaagctaaagtggttagtgcagtgatactcagcctcagaggctttaaaacactggcagattgttcacacagaattgtgcctgatttgcctgatgcatgccattaggatgatcatggacaagatctcagactgtcatttagccaaaactgtgtacatattatgcatagaacaactcacccaaaattgatagctaatgggaaagtttccaactaaataaagatttggaatccatttaccgctcagtaagctatttttgctccatatcatcaagtttccagaagtaactgctccttacatatattctaaagaacgtataataaaaaagcccagtgacaaaatttgatttgatatatatctcatccatctgttttttttggtagaaacctaggtggtatgtgttaaatgttaagtataagagaattctcaatattttaaaaataactcaaaatattgaggaaaacacctaaaacccattgatgattgtggtagctcaggctctaacagtttcttaaaatgtgtccatgtacacactgggttagaatcactgttctcatttacaagtagagcttcctaggccccacgattctcattcattccttaaatgagaatgggggggaagttggggaagggtctggaatttgcatttaaacaatttgagcgcgatttgaacatgcattcaaattccagaacccctgctttgatattatgtcaatgattttggaggcagatttagtcccgtcacaggacattgtcgttttttaggtgcccaggtttcttgtgacttcatccatgagatggcatgtacagtacctgagtacctgccactgggcaaaaagatgaccaggtgagagacgaaggaatgagactgcagccctcaccatcagggcacaaacaccccagtctcacattccgtcaagagtcgttctattacttacatgtcatccactctagacagtgcctacatttcaatgttgagcgtgttccttgttttcttatgattagaggtgacacagtactctgtgtccagtggccgcccaggtttttgaggtaagcaaacactgtcctcctgatcagcagcctccatcttcctactgatcacagggcagcgtggcagtggttaggagcacggactccacctctttccgactgtacatccttggccaaggtatccaacctcacactcagtttccttcctacctcacactcagtttcctccctcagtttcctcatctacatcataagggtaacagtagttttggctgtgaggattaaatgggtttatatttacagaatgcttaaaacagtgcttggcaaattataagagcttatttggaaaaataacaagattagaaggggtggatcattccagaaaattaaggaatcaaagagaaagatggagagattaacaccaatctggcaaaggaagccttccaaagaaaagtgtacctcatgtgtctcttatggttcctggggacatagtgggacaaaagaagtaaaaggagaaatggcaaaggcaaaataagcattgtcttagataaggaatgagggaacaatgaagaaaacagggctgcatagtcacttatataaccacaaagccgcttagtcctatgtgtgccttgactatgtgtatcccactggaatgaaggtggctgcactgagcacctttgggggtggaggatgctgaacaatgttagcaaactgcattggatgtcacacccagcttccctgtgtctgtccggagaaccctcctttctcctggtcttctatgcccaacgtctggctatttcactttattttttctcctcccttggccttaagtcaggaactaatttttccccactttgcccttcctatgtcattattctttcctttctttcctactttcttttctggtaccctattttgaatgtgtgtcacctttaacttcaggtacatgaacaagctcttagccagtctttggaagcatctgaccacagcacctccaccacttttctgtgcaaaacccttcaatgaccctgcacaataatgtcaagactttatcagtgattttcaaagatttttcccactttgggcacaacgtgcccttctagcatcatctcccactactgggcctctcccccatacctaatcctcctcctacaagccctgctcttgccaggctcagcaagcaggtccatggactgagagcacctttgcacttagcgggtcctttgcctggggttgtgtctgatctggcccaggagcagttagggaaacgttactgggccagaagcactgcaggtgggtgtactgagttgaaaagtctccccgcaagatccatgtccttcccagaatctcagagtgtgaccttctttggaaataggattgtgtaattagttaagataaggtcctactggagtcgagtgtgtcctaattccaatacaactggtgtcctcttaagaagagaaggtacagtcggccgggcgcagtggctcaagcctgtaatcccagcactttgggaggccgaggcgggtggatcacgaggtcaggagatcgagaccatcctggctaacagggtgaaaccccgtctctactaaaaaatacaaaaaattatccgggcgtggtggcgggcgcctgtagtcccagctactcgggaggctgaggcgggaggatggcgtgaacccgggaggcgtagcttgcagtgagcccagatcacgccactgcactcactccagcctgggcgacagagcgagactctgtctcaaacaaaaaaaaaaaaaaaaaaaaaagaagaagagaagttacagtcacacacagagggaagatgacatgaagacagtcacacacagggaagaatgccccgtgaagatggacgcagagagggggccgatgcagcttcaagccaagaaatgctaaggattgctggcaactaccagaatttggagaggcgcataaaacaaattcttctcttaaagccgtcagaaagggtggccctgttgagcccttgattttacactatgagacacttgtttttagtcaccaggtttgtggtatgttttaagtcaccaggtttgtggtacgttacaacagctgtaagaaactaacatggcagctgttgaatgttaagagccctcagctgtgaatcggagcgatcctacctccctcaccaccgaagagtgttgcagggatcaaacgggctaagacgtgagcgtgctattagatgtgtaaaattctacacaagggtcgttaaactttgacttattttttgaaaaccctcccattcccttgcataacccctaccacaatactttacccataaaatgcgttcaataggcacgtgttgaatgttttcatttattcatttactatatcacattaattttattttaaaagacccaaacttagtcataagtaacatggctcatcttcaaactactgcgtagccatttgtgtgcagctttgactgcatgtggtgttatttcagaaagatgtgatttggtttgtctagctgaatgtaagtaatacattcattataatactagcttactatatattaattttaatatgctcatgaagttaaatatctgtggatctgaaaataagatttattttatttaagatgaaaaaatttgttttgacaagattggctggttttatttatgccacttactagaaatctaataaatacatattttatttaacatgactttttaatagcattcctttgaatttactcatcagtaaatttaatcaatcacctttttaagaaacagaacaaacttgctagtcctagcaccataagatgatctcttgcaaggaagtaaagaagaatccaaacttgagtgccaggaatcattattgataaggtgaaggagaacaagtttcccttttgattcccaacttctacttgaaatatgacacccagaatgtgattctttctatatccatttcctctaagaatctttgagcaatttgtgcgtgccctgtggttaatacagcctagtcatagcccagtgaagctgtcggcagtcctgcttagagcagaaacacagaccatgacagttacaagcatgtgatccacagagccaggaaaagaccctgagacataacccacttctgtacctcctcagtaggagctatactcaactcatgaattaattttgagctcttaatggcacttattaaatccagaagaaaaatacctaaataattcttacttatatttaatagcaatttagattcctgcaagtggggacaaaagctttatttcacttccaaatggacttcaaataacatcaattggatgtgcactagaaaaatataattttaaaaggtgttcccaagaattagtaaagaagaaaagtcatgggaattagggagagtaatttctaggaaatttttattggctgcttttgtccacatgatatttacagtgtatgagttaggttaagctagactataccaaagtaacagaatatactaccaaatttcagtggcttaagaatcagtaagttgatttatttttcaggttaataggccagtattggtcaggtgcagatgacttgggagaagaaggatttgctccatgcagttgtagggacatgtggcctcatgattctagtcacaaggttgatgttgtggaggaggttttaataggccaggtctggaaggagtatgtatcacttatacttcttccattggctagaactcagtcacatgaccacacctcactgcgcaggaatctgggaaatgtagttcatcaaacactcaagaataagtggaactgaattttaatcaataactacaagtctctgcatcaaggagaaatgtgtacctgatgtttatcatggaagagaagaataattagttgactttttgtgtataatccccaagcaaaagaagtctgattcatgctaaatcttcctaaaacagaagtagatcatttgtggggaatatgttattagaacacccctagagaggagcctattacccaacttcattttccagcttcattctcttggcaggagacgtatttctctttctgcctgtccacggagtctgtgccacaagcaaagagatgctgtatgtcttgcctataaagcagggctgggctgcgaagctgtcgagcccggtgcaaaatggaaatgtggagctcttgattcaaaagcaggaaagcaatgttacaaactaaaatataaagcttttatctttcttccccagtctctcaatttgccatagtgttttttacttgctatttagctgcattctaagaaaaattaaacatttaaatattggcatgaattttaccgttcatcttaatattgtgcaattccaattttaaacgtaaacatttaaaacagggtctaactcatacgtgcaatcactgaaactaactacacaatttgaatttcgtaacttatatatgtgcatatacactttgttcttgcaagaacagcagacatgtcgcataaaaccaattcacttgtttttatttcacttcttgagactcgcacattctaccaacattctaccttcagtttactgatgaataaggaagaatggaaagggaaagaactatggggtcccctatctttcccttccgttccatgtcatcatttcctgcttcagttgctggctccaacaagaaaagcacaggagtaagaaaggatatgatagggttcattggtcactatgtttcttagaatgccattgccttctttctgcattcaaagcaagttctggttcaaacgaaaagtttggcgtctcggggctgtaagtacccctgcttactcagtaggagatgtcacacatttaccttgacccctgcacactgtgggttcaccaaaattctgtctccaatgggcgttgaagagacttaagccacgcatagagcccttctaagtgcagggcctcaagcaacttcatgttctgtactatactaaagttctatactaaaagacacatatttagaggaaggataccacagaccaacactgatgtctacagcagcaagaactgtaggacatgccgtcaattttgtaatggcttttaaggggaaaaaaatactctattaatgtacatcttaattggaaggtgcatccaaatttcagaaaaatgtaaaataacagggggaaagcttcaattcctggaattgtagcacatcacattcttttccctaatacctacctaacaactactactactaatggactaatatatgtttttaaatatttcaaacatccagaaaaacattgagactgatctatgaatccctgtgtacctaccaatcaactttatcaaatctcaacagtttttccacatttgcttcacaagattcttaaggggaaaaaaacatttcgaataacaccgacaccacctgtggacccctcctgtacttatttgacctctcctccctactctgaggtgatgagtttcctgaaatcattctttatcattcacacgcatacttttttactctcagtatatatatctgtaactagaaacaatacatttttcacgttgtgaatttgataaagaacagtataataatactgtacatatcattcttcaacacgctttcttatgcatcattattactttgagatctgtatttctacatgtgattctagttaagtcattttttttttttttttaattttagacagagtctcgttctgttgcctgggctggagtacagtggcacaatctcggctcactgcagcctccacctcctcggttcaagcgattctcctgcctcagcctcccaagtagctgggactacaggcacacgccaccatgcctggctaatttttgtatttttagtagagacggggtttcaccatattggccaggctgatcttgagctcctgacctcgtgatccacctgccttggtgtcccaaagtgctgggattccaggcatgagccacagcacccagccttagttaagtcattttaataactaactagtgtaattgcataaatataccccaatttatccatttatttgattgtcattttaaatgtttctcctttctctttattataaacaatgattcgggaaatcttcttccgcatttctcttagtatatgtgagctggagtgattttaaggtaaatacctagaagtagaaatgctgggctgaaagttatgtgcatcatatctttaccttttctacatgtggccaaatggctctccgatctacaagcccagaggcagtgtgtgaggtgcatcgctcgacaagccggctgacgcttgtaaatgcccaacatctgaatccttgttaaacacagaagtgcaagatgtatctttaaatttgcatttttcccaatgactagtgaagttgagcatcttttcttgtattaatcaagtttcttttctaaaaattgcctatttcaatgctttgttcatttttttctgggttatgtatctactttttatcaatttgtggtattttattcattatgaatactactgtttggtcatatgtgtttgcagactttagtttttgtgcctatttattcggtcttttacaaaaataagattctaagtttaatgtcattagattcatcaaaatcctctctttgtgatttcggatttttgtaccttgattaagacaaccctccattccctgacatagtagtgtcattgtcccaatctcaattattgacagcatcaccctaactccctgctctgcctctctctgatgtgaagtttccctttgtgcatgtgttttctgcttttcttgttttacccactgcaggtatacagtccctccatctccttcgaaattatctggtctgttcttaaacctttgtgtttctatttgaatttgaagatcaacttgtcaagatccattttaaaaatcttgctggaattattttttggaattgcttagatttacagattagtttatgggaaatttccacgtttaagagattgaattttcccttcagaaacaaagtgcatatctccattaatttagaattttttatacttcattcatgtttttaaattttttccataaagatttgcacagctttcgttagtttcagggttcattttttgaaaacactttgctgtttactacagtccttagatttcctctgtaacataatctcttaaatttattcatagttataacggaaactgttgtactacaccttgattttttgccaatttagggattactgaatgaactaatgcaaaatccattttatgccaatctatacacttggttttgaataatttattcaactaaatactttctaaagagaatcatatgcgatgaataaaaatatcttgaatagattggaaatgttcctgttttgttttcattgtaaatgcatactaaatgcgttaacaacatagaaagattctgggttctagtagattcctcaaatataaacactttggatgcaccactgtttcaaaagatgaatagtttaaacggaactcctatttacagccatgtttgcaaatgcattttttactttaactattctgagatataaaaataagcacagagattttgtgatagctttgcaactagcagtatttttgaaacatgaaataggcgttttgtctggagaagccttatctatcacagtccatgtctgaaatcacagttgtttaatgaactctgttttatggaagctgccgatgcctcattcgtaagtctccccattctttccaatgtcacacagactttggagatgaatttaaatttcatcattatccatgacctacaatgtgtgcattgaccatactagattttccctttttgaatatattcccaacactgcaactccctgccctgctttattgttcgcttgccagtcctcggcatcgttttattcctccggcattttaaacaaaataaagatccaggcttatgctgaggcagtgctgaacaaacccaccaaaatcctcagaactccatccattcaaagaggagcgccaggatttcccaagcgacaagaacagggcgagctctccgatcctttctccatccccccaaacctcccctggctctcgagaacaccgtcagtactccctaataccccgtgctccaaatccggagctcggtctccacccggccgcactccaagtgacagcaataatagctggtgtttctaaagtgcttactggtaccaggggctgcatccgtgtagactcatttaatcctcacagccctaagagagacacgtttgacagatggagaaactgctccgggatactccgtcggggaatggcaggagctggccccacagcccggcctggcgccaccgcgcactgcctgggccctgcagcttggagcaggccctgagtgggctccctgcaaatattctcatgctcccttctcaccaccgccctgcaaggggcatggtactgagctcaccgttttacaggtgaggaagccacggctcagccttccgagtctcctctacctgagcctcagagcctggctcagaggctctgtgcccagaacgacagtacataagaaggagtgggggagcctgtcggagccgcctggggcattagcagatccaagttccaaatttggaaaacttaaatcgagttacaaacctgtcatcaatttgacagtaatgtttttataattacacattgtgatacttacctgcattataaagcaatttaaatgttgttttgtttaacacctcagcttggatctggacgtttttctaacttaagaaccagaacaacggtcacaaatgggctcctgaagaatgtttcagaatgctctgttcacaaccatgggggcgtatctgccacctctgcccccaaatggacaatccgtcagtgtgataacccatcttctagaatggtaattaactcgagaagaggcagtccccaacctttttggcaccagggaccagtttcatggaggacaatttttccagtgaacaggggagaaggtggtttcaggatgaaactgctccacctcagatcattaagcattagattctcataaggagcaagaaaccaagatccctcacatgcgcagttcacaatagggttcatgctcctctgaggatctgatgctgctgctgacctgacaggaggcggagctcaggcagtaatgtgtgctcgcccactgctcacctcctgctatgcagcctggttcctaacagaacgtggacctgtaccactctgtgacctgggggttggagaccctgcttggagatgttctcctttatccctacctgttcattgcaacactgaataaaaatttaactgaaatgttcattataattcacatgcattcaaatacttggttgtacttgggtaactgtcagagtttcctatattacctcactgctctagctttgtcttttgttccattccatacatcatttctagactagtcatccaaaatgagtgttagaacatgagtttagagtcatatagaccggccatatcctgactccatcctacactgcccatattagtttcctgtggctgctgtaacagatgaccacaaacttggtggcttgcagaatgtgttctctcacagttctgaaggccagaagctcaacatcagcttcactgggccgaaggcaagctgcgggcagagagaatccattcctggcctcccccagcttccactgctaccagcattgcttggcttgtggccacaccacgcaagtccctgcctcgtcttcacattgcctcccgctcttctgtgcactgtgtccaaatccccctctgcttccctctcataaggacactgtgattgaatgtaaggcccatctgggtaagccaggatcctctcctaggatccttaacttaatcacatttgcaaagacccttatcctaataaggtacatttataggttctgggagttaggacctgacatctttctgaccatgggtcaacctgtgtgattgcagggaaattatttaatctgtctattttcagttgttttcactgtctaatgggtatctgtttcacagggttgcctgaggctcagaggagacagttgacataaagcacttactgcaatgcttggcaaaaaaaaagagaaagcttttaatcaataactatttgttttgtttctatataccaaaagttcagcatctctccattactttctgtcttaatcccttagtctattaggttggtgctaaagtaattgcaattgccaaagtaattgccgttaaaagtaattacaaaaactgcagttacttctgcccccacctaatagaaatccctatgtccatcatctagttccaacaattttcccaaccttgtcttttactattttctttgtagactttctagtctaactagatgcgtttgctaaggagtccctcaactgaatgttcttgcttctcccctttgtgtctttattctttgttgctcctgcctgtgaaagttgactccttcctctttgcctatccaagtactgtcccttctgccaggacgagccccattctcatcctctccttgaagctttccccagtcaacccagcccaggctggtctctccccttgaggatgatcagctgctctccatgatgctgcctcgctcttaccatgatggctctatacacgtagaccaagctgcatatagacatttacatgctatgtacgaagcacgcagcaatgatggataaaccattgcgacagagaaccccaggaagtcagacctgggctcagagactaaattaacatcttagatccctaggccagaaacagagtaggcagtgagggggcctgaagcctcaggcctcctgagatctcagttgaaaagcagtccgtggtggctgagagcctggcctccatggggtagagaggatgagagtctccctgtggggtggagtaccaggccaggcctgctgctcagaggcagaggccagagtggagtctttcactaaaaatgaaaatagaaataaaataaaaatctgctgccaatgccatctgctgctggactggaggctctaggagttgagtgcagacagccacaaaactactagctgggaaagagagagcaacaattgagaaggagtgaaagaaatggggaaaaacccttttccttctaaaataagtctgcaaataaaaaatttcataacccatgaagaatttccatgctaaaaaaaggcagcccacacaataaaaatttagaacacatgttcattctgttattaaaataaattcctataacagcatgagaggtcccgaaatcatgctagatatccaaagaaataaataggataagttcataaaagtaaaaataaattattttttgaaaaggatagaaatcttgaaacaagagcagacgaatctgaagaagaacaaatgataaattgggttaaataaaataagaagctgcccagggaggatggaggttaacggcatcatgatgggagagacgaatgagctgaaagctgctcttcgaattggaagtgtatttccaattgagaaagattaaatatgtaaattgtatcctaagcacagtgtgataaaactgaaaaacattaaagacaacaagaaaatatttaggccaccaaagagaaaaggcagacgccacaaagacccactggatcgtcagtggaattatcagcagcccgagacacaaggcagtgggttgatatctcgagtgctgagaaaaaacaaaagcaactacctagaattttacacacagttaagatatcacccaagagggaaggtaaaataaagacaatttccgacatacaaagatgaaaagagttcgccaactctacttaactctaagtaaaattacagccgaagtgagtacattagtaagaagaacaaacccacagctaagactgagataccagaaataatggcaagtcccaaaattgataaaatgtcagtaagacttatgaactataggatttttgtaatgtatgtgttttttttttttttaaagccaaactaacactccagacaacaatggcaggatgtcagaggagttttcagtcgtcagccaaagctttgttttatctggaagaaagttaaaaatatttaatcactatggaatttccatacctaaaaccatgctaaaagatttaaagaaaaaaaatgaaaaatccatattaagctaaagaaacataaggagtaatagtaagatcagattaaaaaaaagcattaatggagaaaagaggggcatcgtaggataagaagaagcaaaatccaccaaaatgacgtaaaaatcatgatcctgtattatcctaacaatatagcagaaacatgtaaagtaaaagctaacaaagtgataagaaaactggacaaatccacaaagtaaaggatcataactctaacagatcaaataaaaaattattgaggatatggatgattttttagtaagaaaattaacaggtgagttttgacatatagagaattctgcacccagtagcgatagtcctttgtatgctcctagaacatttacaaaattgaccatgaagaagattaaaatttcaacaaatttaaataatttatattatttaaatgatattctctagcaactaaaaaaggtacaactaaaagtatagtgtttgaaatgaatttataattcataagctaaagcactggatgaaaataaatgtagaccattcaatttaagaattagaaagtgagcaacaaggtaaatgcaacaaaaccagaaataaacaaaagagcaaacattcatgaaatagatgtcaaggaaatggtaaagaggatctgcaaaacaaaaccaggttctttgaaatagcaaataaaatacacgtttcaccaagaatgagcacaagaaaaaagtcacaagtaaacagtaactcattcataaatcaatgcaaatgaatttggaattcagttgaaagaaataatttactagaaacatataaattaccaaaaaatagaaacccaaaataagccaataaacattaaaaaaatgaataagtaatcaaaagcttccccaccaaaaagaagtcacatacccagttcattttacaatcaattttttctaagtatttaaatatcatttctttctctcaaactattccagagaactgaaaaagaagaatcgaagaagaaggtaggataacttatgtgagcaaaagacagaaaatatatgaacatagttgtaaaaatcctaagtaacatgttgtcatatttaaaaaatcctaatagatcaggatgaagtaggactgtccttggaatggacgtgatcactgtgttcccagagccttgctatgtggtttgagaagggcactgcaccctgtgatattctctccataaaacataaccccaacttcatgatgagaaactcatcagacaaacccaactgaagaaattctacaaaataccaggccagtatttctcaaaactctgaagatcatgaaaaataaagaccaagaatccgtcctagaacagaggagactctggagacctgagaactaaatgcagggctgtatcctggtggaatcctgaaacagaaagaagacagcggtggaaacgctggcgaaatccaaatgctatctgaagcttagttaaaaggaatatgttaacgttgatttcttagctttgacaaatacaagatttaatacaagatattaacattggagaaactgggtgagggatgcagagagctctctgtactatctttgcaactcttagtgttagtaaatctaatactattccataataaaaagtttataaaaaaataaaaagttcataaaaaaataaaaataaaacacctcaacagctactcatgatggaaactcttagcaaaccacaaagggaaaggtgtctcagcttgatgatggtgtccaccatggcttcgtggtttccaacgcataagtagaggttttatttcacacgttgtagtgaggattaaatgaaacaatatgtatgcgatgtcttatgaattaatattattattcctgtgatcccagagcaacaacatcagaagtcggcttgttgctttagcgcagagttcttggccttctttatgccatgcagcacttggacagcccaggaaggccttcagaccacttctcagaatgtctgccaatgcataacacacaattcatgtagttactctgtgtgtacatatacagttgttaaatcacaataatactttttttgatattgaactaaacttccattctaaggatagccctatttggtcaccatgtgtggctgagaaatcaacaggcctgggcgacgtcagcaaggaggtgaggcagagagaagaatccacgtccaatgccagggctgggtctcatgggtgggtgggaaactcagggcaaagagatcctgagaggggacggggaggaaagaccaagaggtcggtgtgggaacttgttgagtttgagttgaatgatgtttccaactggatatttttcataattgcgtaatcttttctgaaaagtagttttcaggccaggtgcggtggctcacatctctaatcctagcactttgggaggccgaggtgggtcctgaggtcaggagtttgagaccagcctggccaacacggtgaaaccccatatctactaaaaatacaaaaattagccaggtgtggtggtgcatgcctataatcccagctacatgggagtctggggcaggagaatagcttaaacctgggaggcagagattgcagtgaaccgagatcgcaccactgcacttcaacctgggagacagagtgagactccgtctcaaaacaaaaaaaaaaaaaaaagggaaaagtagtttttaaatcttttgactgaccatgcactcactccatcagtttaaaaaattatgcatgaaaagcaacacacatacacacacatacatacacacacacacacacacacacagttatattactgcaacaacgtgggttagtaatatgtaatgtatattacagtactaacgtttgcataatgaaaacacacgaataaaaattgtaaaggatgatgttaaaggtaatacaggccgggttcagtggctcatacctgtaatcccagcactttgggaggctgaggtgagtggatcacctgaggtcaggagttcgagaccagcctagccaacatggtgaaaccccatctctactaaaaatacaaaaattagttgggcatggtggcgcatgcctgtaatcccagctactcaggaggctgaggcatgagaatcacttgatcctgggagatggaggttgcagtgagccaagatcacgccactgcactccagcctgggcgacagagcgagactctctctcaaaagaaaaaaaaagtaagcacagatataagcatttttctctctgcatccctttgatttggtgagctccaggcagtaacatcaggtacagatgtaaagtctgaaaaaaacagaggagttgtgtctgcaaaggatcactttcacaatgaaagactagagcaggtagagagattggggacccctcccaccctcttttccccatcccctctgagccctgctgatgttgaaaggtagctgatgcctcatgcttcagctctgagctttactgctattgatgctacatctcagtgagttctggcttggagaccactggtcccacccaacccaccatgagagacgatttgtgaaaacagcccagagtctggagtctgaatgccttggtttgattctggtctctatccctttccagctaaatcttacatcttagacaaatcatttgatcactccaagccttggttttctcattcataaactggaggttgtatatttcttttcacagtgtaatgaggattaaatgagacaatgcaaatcaaagtgatttgtgagctagaatgccaggaactacaccagcatttgttgttactttttgtataatcaaacctagtcatgcagtgtacattttcctgtctacatcttccatcaactgtaaatacaatgggtcatattctgcctaggtccagaggtggcaataattctgcaatcattaggttaccttttcctatccacagcacttgttttcctgtcctatgcaaaacactggttttcaagctgggatgattttccctcccaggggatgtttggttgctcccagtgagggtggggatacagtactggcttcagcggataaaggctggccatgctgctgaacatcccacactacacaggacagcgccaccacaaaggacagaaagcgtcagtacctggagcggttaatccatcctctgaaccgactgggatgacgggcatggaagttttggttgttgatctttactcctcagttgaatcccattttctgttagaggttacttacctacattagcagaaggccctggcctggctttgggtgtgtctagggggcactgacgcctaccggagatgggagaggagaaggagacctgcagggtgagatgagaggcggtgaggagagagagctgctggctctgccttcacttacgaatgtaacctttctaacatgtattaagtctctggtggtgaaaacctcaaaattattgaatttcagttttgtataagtagcagtcacattttactgctttcccttcttctactgttctcttctcccttctgtttagttcttctgactcttttgaagttcaaaaagccttatgtaccagatcatcactcttccgttctccctcttcttctttcttttataaatctttgtgcatgacacacatttaatgaccaggagatgccgtcggtagccttgtgtccatttctggaatcccaagacttggctttcaccaccacttcctgaccacagcaagcagttaccaagggcaatggagatactttcattcctagccttggccacttaccctggtgccttctgttgattttcagaatcagaagtcaagttgatcatctgaattatgagttattcagtctaatggcaaggaaattaataagacaaagtcgtgaaactcccatctgtctccaagctatctacttgtggatgtttatcaagctaagaaacttgccatatgtgtaacatattgtctgaaggaaaagaaactctctacttttttctagaaaatcctgacattgtatgttgtgtttttgttccaccttattaaatggccttctcttcttgtcacaagtaaataaaatggcttcatcctgttcatctttctctgttagctttccataatagtaatatgaatggtttctgtttacatggggtgttcaacctcactcctcaaaggatctaataacatcttttaagttcaatctgttcttgtattttgccttacaaactaacatgtttttaaatgtcttttcagaaatgataaacttgaatttttctcatggtggcttttgtccaaacatctctaattgttttggagataatatcctattcattttcacaatattcctctgaaaatgtaggcaatattatgccaccttgcgcatggtcagaccacagcatgtgggagttgattaactctctttttgccatgcttctacattgctcatcccttttccattctgttagcacgtggatgctatcaattctcttctaatcatcctttgcagttagctgaataccccttatgaagtttatcagcctcaactcctgtgatagttccttgaggacatcttatcctccttcattagcttacagggtcagtctccttctctgattggtttaggaccatgtgctgaactctgcacatatgatccacacagttcaatgtatataattacaaaaatgtctaagacccaaattaaaggaagcaatatgagcattacaaatggatgcatcattgaacacacatatatttatttctcaaatatagaaaaatgaaaatgtagcattcttataggatgatagtaatatatttgttttcaatgtgcttttcttatttatttaatcctcatgaaatctgactatataagcagggttgccatgcccaacttaaagatgaatgaactgagactcagaggctgggttgccatcccagtgtctccaatcttgcaggaaatacagtatctcctaacaaattccagtgatcacatggcagttctttctattctgactataatattttctctgaagctctattcaccaatcttgccttcatgttcacctccctcatatctcactttcctaaaacccaccttttatcacatgtcttcccccaaatcaccaatagttagcaaatgttcctcagagggaaataaaaagtattgagcatgtgagttacagccttccataatatgggagttttgttcgcctagaccttcctcttgcacagcctttctttttgggcacactgggctgttcactatcccagccacgcttcacatctcccagccccggggaagatgctacccccttagcaatgcccctctagcacctttctttaccaaccagaatagaaatggactcacagagactcattcactgcctgtttcttcagcattttatgcccctttcaatcctccgtgctgcctcatacatttcttctacacagtagacatttggttaatactcattatctggttgataccactgaaaatatgaaattaggcaggaaactcactctgaggacaagacgatgtctactgtaatccacctgcagacgtgttagaaatttgcactaagtcacagatgcttatagtgtgtgtgttgagggcgggtattcttaccagatttttctttaatgctgcaaattggcagcctgagtgttttgagcatccatggccattagaggcagtctttcaaggggagttttcacgtcagtcatctctgtgccctcccactgtactgaaaacagtgtctggtatgtattatgcactgtaagaatatttttacatttttttcattgaataattcatttaaatttgatatacaaagggatccaatgcaaactttcattgaaaggcgtgatcctggagcctgttataatgtgtgcaggccacatctggccatcacgggcaggttcgcatctcacacagaaaacatttctagccagagagctgcatggaagcccaccacccttcccttgagaacacactgctttatgaaagaacaggacaatggcatctcaacatccatacattcctcttcagactcaagtagtggcatacccagtattccactgcaggataacactcagaatatggaaaatcggtcccagtgacacagcttttctctgcacagtagctagctcctctccagctctttcccatctgcctccaactttgcgtgtccatttctgcatgagatggagcatgcgagaacatacagcacacagaccctaagcagctcccaacactggaaataccttcctctctcctgaacgtgctctgtgcaattgcaatgagagattccagcgccactggtaacttacacttggtaccaacccataactggctgctgcacaactgaccggtgatccatgcacagtattctcgtggaagtgaatgagggttttgtgaaaaatctatggcggggggggggggggggggggtggaaaaatgtccctgacgtctgttgaaaacagtcaggccctgctggagggaattgtgtcactgtcgactggctctgttaggaggaaacagtttccaggccctgcagggccgtggctggcttccttccccttccttgaagctcctgccccggccctgccacctcccgcagaccgaaccctcgctgtcacctccccttctgcacagtccaggccggtcgggtgtcctcactccctccttctcctgcagagcttccggaggggacgcctcccgcgggcgctggccgcttcccaggccccggccctccccaggcctctctccccgaggctccagccggctcccccttccatcctccccagcgcactggcccgtctgccctcctcgctcaagtctccacccggtagatttaaaaagtgaaaagccaaggccacgtctatgtgcggcctcgccctccttccctgcgaaccctggagaacacggccttgtgatgaagcaaaccccagtctcctcgctttgcatgggcttttctatccaccgcgagctgaaacttctccctaaagcaaccgcgtctccagactcctgggcgctttcccttccgactccccgaccccgcgagcctccctgcaggccccttctcctccctcccccgggctgcgggtgctgcccgcacagcctccgccctctgggcgctcctatccttcgcactccagacccgcagccccaacccaacacctgtgagctccagaagctgtctcccccgaccccgggccagcctggagtccctgctgcggatcggatccccggtgcaggcctccctgccagcagcgcagatcctccttcccaccctgcgtttcctacctgggtcctgttgctcccgttggcttacggaaaggaaactcggtctcatttccatttctgtaggaaactcagagatgcctgggactcctcccgccctgggactccccactctccgtagttcacacaatttaaagttccccatttttaattttccctgcgggactgtctagctgtgcgttagttcaatccttctttcgatggttttctcactgggattcctgttgctagtcctctccctggccctcaacccgcaaaccggcgatgttcttcctgacgccggagtggcctctacctcgcaggctgtggaggtctgccacctgccaagtaacaccacgtgtttcttaacctgcgcctcagtttgatcatctatgcaaagggggagtgatcacatctagctaatacgagtgttgtgaggattcagtacgttatcataaatcatgccccaagggcatcccggagctaaacaaggctaggtaggagttagtgctgtcccacttgtcagatcccagcaggacacaccaggccgcccactggctggctctaatcctcctctacaggcttctgtccctctgggaccttaccttcctgctccctcgcctgtgctcacactggaccactccttgtcccttgaccatggggccgtctccatgccccaaggaagatgttctcttctctgtcaggaacatctccctcctgtcccccagccatgggagtttaaagtcaattcaataccaccttcttcagaaatccttccaggctcaagttcccccgcctcttaccctctaagaacaggaaaacccgtggaattatttgctccctctgtgctcctacccgtacccgggtcatgatttcagcccagcaattgtaacgatccattggcggttaccccgcttggtagtgactgctttgaccagtgaaatctggatccaacagtcttgagggtcactagaccactgaaaggcgagcagtaggtggcaaagaaatactggctaaatttaaatttttgaaattataaattttggaaatcatgacctagggtaatgttttctgtgctgggttttatctacattattattggtttggggtgtttgctctgcccgggaacttcaaaaaccagtttctgaccttcttttaaaagtaaatctcttacttaagattgaaatatattaaattcctttatttttgatgaggaaccataagtaaacaatggatggatttttaaaacttttacatctcaaagaagacatgaaaattgaaaaatacccactttgctttaacatgactgcaatttgataaacttttatttgcaaaagaatatacagaatctttattttaaagacttatttagtggagctgaaatctcaccattgtactccactagaatgaaacctttgttggcccggatcttggtttttgttgttgttgttgtttttaattccttgctctttagactgttgtttaaaatcttatgttttttaatgtgttaccaaggagaaaatgtgagagcaaattccacagtgtagactggaatgcctccccctgccctccccagcaacacacacttcacgatgtctgcatatgttcccgtcctcatcggcaggcttttgttccagtcctgagaaagacagcctcccactaaacaaataaggcctccaaagcatgtgtttttctttggtgttcctgcaaattagcacgaatctgtgctatgttgtatggaatttcagagagacattttattatttgtcctcgataggaaaatgtgcaaaatccatggtttgcttattccagatagaattatctcacttttctttaaatcagcatcagtaagcatgaattcagccacataaataactttacttttaaaatcatgaataaaagttgagtttacccgctaaaaagtatcctttgatccaaagaatatcaattatatagccttaattttttaacggaacttaaatattatcaaagctgtatgtctagaatgaagaatgaaatgaatcaatgtattagaaatttgcagatgtgttacataacaatcacttcctaacgaatgcttagaagatcctatttatacttttgagcccttagattctaccccaaatatgtcttcttaaatccactgtttttcttttctctttaatttcagtttgtttggtttaatgatagctactgaacataaatgccaaattacaatggcacttcccagctgtgtgcagaactttatattttaagtaccaatttgtgataaaagaatgcttccagctcaattctcatcagcattagaggttttagcaattgccaattatttttctaaattacctattttaattaagtaaaatattgtgaatttaagattatgaagtgttcaagcattatttcatctttaactaattagtgagaaaaaggaaattatattttgggacattaaatggctatttttagaataaaatgcttctatggtttcaatgccttaaattaacagaaaatgcacaaacttctctcgaaatcctgttacatctggggtctttgaagtacaccttgaactgatcatttgttctaatgtaacataaatttgtatattaattagagccaaaatgcccaagagattaagcttggtatctcccttgactaatttaacacatctagatccctcagcaacattttaaaaccacctgtttctattttgccttcatggaacaaagcctagaacataggaaggacctcaatgtataactattgatatgactgtcatccttagttcagttctgagatttccattcctaacttatcattgcatctacattctatttcttacaagagcacttcaagaaatatgtacagatgaaggaaaattggcaccaaaatctgcctgcctagcagcttacagcaatattggaaggcgttgaaagccattattaactgacattggcaaagtgattttgaaaaatcttcgttttatatgtcaatgcaggctatgatggtccctaaactgttgcttcaaggcagagatcacaaactttttctctaactgtgggtctcccagcattctccctcctgaacacggcctattaacggtagtgagctccggagggtaaaagggttagtcaacaattctgcttggctgcttcaggggagagccagtgttttgcagtctagtgaactaattatgcactcttgatgagatcattaaaggacaataaaggaaaatggaaacaattcacaatatgtatagacaaatttctatatcgaataatttttgtttgtatttaaatgttgggtagaaacttttctatcctgagtaatggttggttttaaaaaaagaaaatcttcagattgaaacttatcctttaagcataaaagtatagtcaggaatttttagtctttatgactaacacagatgataccgatagtttggtatctccgatctgatcaataaactctactcttacaatggagtggtgccctgtgagggaaggggtgggcactcctggatccccctgagcattttcagtgcttctgtttcattcatccaccttattctggaaattcaactggggagatttatattttagatatgtttttattaaaatgctcctttcaaaattgttttccaatttattcaacaggcaatattaggtaatatatttgaaaatacaaaaaatggtgaattttgtcattgattcctgtgtagtcacgtgaattcttggagtttctaaaaggggattttttttacattggtttacatcccatttcacgtgacaatttgaagcatccaaaatgatacaagcgaattggatggatgactcaattaaatacaatggaagtcaataaagatcaatgcaaagtagtgtcttgaacagcaataatcccataaatacaaactaagaaagaaaccaattaaatttagtgtgggaaaaagatgaagaggttttgataagtgagaacagtacaactcaaagaacagccaactattttgtgacatgtcaatactatcgctattgagtgtaaaatgcatgagtccgtctccctcaaaaccaccagctcctgctgcaatgtaaggctctgtggggtgaacagtctggaaagaagaaagcagtgattcccagcaatggtcagaatccaaaagctgagaggccctaagaggaagaacagcggtgattttgcaccagcgatcatatgtctctgcgggaagggcagcatttaagagtctgtggaaagagggttttaacatctcctttccccaggagggatgtcccagtctcagaactgggatccttctggcatcaggatgaccagaattggggtgcccttaacggccagccctggtgcagcctcctctgcggagctggacgtgcccccagggttgctcagccaaacagaaggatcgagaggcaacatgataggtgcctaggatgtggctataaaaggttcttgtgggcactgtgtgatccttcattggccagtgccactgcaggaatgatgaggaaaatggccagcagttgagatatttaggctggacattagctaaggggctgtcttggcagctccaggagatgggctgatagttcatcttaaagattacagacccttcctccttgcggcatagaatcctatgtgaggcagctttccagaggaatgctggcgtccccagtattaagacagacaaaaggactggaaagctacgggggagaaaaggaattaaataagccacactgatttgccagaaatccctccattctgtgcctagatgttgctcttgctcatgtgctatgtaggactgccagattcacaaagaaaaatacaggatacccagttaatttgaatttcagatgaacaagaaataatttttttaaatataagtatgtgtcatgaaatatttaagacatgcttatactaaaaatctttttgttatttatgtgaaatgtaaagttaactgagcatctgtgtttgatcaggcaactacaggaagaaccacatgcctcacacatacatggtctatgtcctctggccacctgcatgtgacatgctgaaactatcacatcaacaaaacaagcccaaagctcttatctctgaagcactgggagttaagttactaccttagaggagatgagcactttttaaaaattaaatgtggaaaaaaaaaaacgtggaacactcacaatgcaacatgacttatccttggcctccaaagccctcacacctagattattgaattaatttttcactagttcttcctactttccactttctccccatacctctcttctatacaaaactctcaaatcaactgctgcgaaggctgctttcctaacgtgactgggtcccctttgggcatccagtgaatgcccaaacaggcatgaaagacccttcccgagcccgctttccaaagatacgtatgcttcctctgcccttgaatggtaccccgggctaggaagttacagatgaggccagtgaagaggaggctcgtccctccatgaagctgggagggtcattccaactcaagggatcagggaacacttccagagggagatagcatttgagcttcgctttgaagaatgagtgaaatttaggtatgggacgctggggagagaaaagcctggctggtcttgggcaaaggccctggattaggaaggtcttgtgtgttctgagagcgagaggccctattggctaatggttagaggatgcccagattcaacaaactactgacctttttgtaatctctagaaactttttggagtgccatgtcataattaaggccatgcaacagggaaagttatctgcaacgattttaagcatcagaaactaagaagttcatttaaaatatttctgatctgtacctttaaaaattcattttcagtatcactataatccactcaactgactctaagtctcatgcccatttcagaagccctagctgagtctctatcctgtcccaaccccactccgactgcaggtaagattctaatggctgatctacctttgtgcccacgcacatcctcttgctttacttgctagccttctcagccgcctctagatctctgcacacaccgcgctgttcaggggcctttttatgtgctgttccctccgtctggaatgtcctttcccctcttttctccaaattcatccttcaggattcaagctaagaattgtctccttcaagaactcttccctgagccccgagacaggccgaggggcccttcgcagcgctctcctgaggaagccctcgccgccgtgtgcggaaagctgccttgggaaagtttctcccatctggccctgagctgccgcagtctcctctggctcttggctcctgcagcctcttctccatcagggctgtcagccagtctctgggcttcagccaccgcctttaagctcatgactccgaaatttcagtttgcctgagccacagacgtatatattgaattatctgttcctaaaagcctcaagatcactcccaactcaacatgtttaaagctaaactctcatcttccccaagcctgctgcttgtcctacatcgcttctccatccctgagcaccagaggagcctgggggccgttttagactcttcttcgcccttctcctgaaccagcaccccagcccagtgcgccacaggtcatatctgagcggtctccctacgaccgccacgccccatgactccctcctcttccactgctgctgcctgggttcccactgaggagctctctccttgggagccgtgcccctcccacttcagtcctccccaagacatttgtatttattttctattgctgccaaaacaaatttacagagttgggggcctaaaacagcagaaatttattatcttgcagctcaatagtgcagaagtccacataggtcatacaggactaaaatcgaggtatctacagaaccgtgtcccctcctggggctctgctggaaagcctgtttcctggccttttccagctttcactccttggctcgtgggcctcttcaaagacaacttcttcaaagccagcaacgttgcatctccctgaccgtttttcgtgtcatctctagctgtcatcttgtgcctcactctgccagtttaaggaccatcgtgattatacttgatccacccagattatccaaaaggatctccctatctcgaggtctttaatgtgagcatgtgtgcaaagtaccttttgtcatgtaatgcaacatagtcacatagtcacgggttccaggaattaggttacgttcatcttggcggtggtgggcagaatattctgcctaccacacagtggagtggtcttcctaaaacacatctcttctcctactgacaattactaactactacctgtggagtaaagtccaaacttcctatttgggcataatggtctccatcctccgtcccgcgtccagtagtgcctacattcaagaaaccactggcatttgctccgtagcagtgtgactgcctctgtgtctactagttctgctctttgaccttgagtggccttaccttccctcagctctcgtgatcattcccaagtcaccacctctgcaaagcctcccaggacccaccctccgaggtggaacggcacactccttctaggtgcttgctgtccctacaaccacatctctcatgtcacctctccctcttcattgcaccttgctggttaccagcagagctccctgtgaacaggaaacttgtctgtcctgttgctgcatccccagcaccaggcatagtgaattacaaatgttagttggatgggcagatgaacgcacattaggctgcagagctcgtgggctgctcctggggcccatgcttgctctcacactaatataagaacagttatccagccagctgaggatgtcaacagccacttctcagaatgaaaaaggacacgaaccaatgtttcactttactacaccactagtgaattaaacgaagccacaagcactcggcttggaagattctatcattccttatgttctattccccaccgtttgggccacttagtattttcttcagtgaacctttcttgagtgttcaataacactatgaaagttgtcattagaccaagaacaaatgaggtttagtttactccttagtagacaactaatgaacattaccaagctgacaggcttaactcttgacttttctattaggacctaaagaatccatagaaatgatctacggttcttggaaagaaatggaaaacaaaatatttgtgggttcatgtgtagacccttatggataacacctcttttattcctcaccaggaccatgtgaggtggtagcactgagagaatgggaaatgctcccaaattcttaggtacatgaagaaaacaagattggaccttcatctatgtgttttctgcttctgtagtaaaatgaggctgctgactgtattaagaattgtacctacagggagtggccaccttgattaatgtgtgggccgagaaagatattgagatgggcatgagtggagaattatagtaaaagcaatcccggtgatgaggaggagggactgatgggttttagtaactgcttgtgcatgcctggttgagctgaaccacgaaacctctttcacccatcattacttgcatcttaggatagggaatgagctgtttgagctgatgaacccttaaagatcaaagcttccatttttatgcaaatagccaagagcaataaaacctaggaaagaaaagtagggaacgtgaattacagtaggatgtgtgtcattaaaagttacagcaagccgggtagttattcagaagtaagctcccagcaaggacaacttttcaaatttgtgttttaaattatttttaaatgagaagaggtaatagcaaaatataaccctgagtttcatttgttctctaatacatcacagtgttaagatgatataaatatgcaatcttgaattagacattactaggaaataatattgcacactgacgtgccaggtacctcctcacactgcagcaggcacagggctttggtgctggaagctcttggaatctgacttaagtaccactctcaaactaaacatggcttctttagctttttttttgcaatggaattgcaaaacccattttgcagtccaggtattgatcgtgctgccatattatactgtggttctatgtaagaaaccacatccagatcctccctgaatagacctctatcatgttgcttggaggtagaacatgcctttaagaataagctgctttgaatgccatgagcacaggttttggagtgagagagctggttccagtcacagatctcctgcttccaggctgtgtgacctcaggcaacttagagaacttctctgaatccacattgtcactgcatactgttgttgtaagcgttacataatgtaaccttttgaaagaatttaaatgttatatctatctggcatttagctagagtttaaagagtttaaagtttcattttagctaagaataaatactgttatttattataatattaatctattatttatatatgttatataatatataatttattatatatttacattttagctaaaaataataaatgatttattataatataaaatttattgttatattagttcttatttttagctaaaatgaagtaaattcatgtgctgtaaaggaagagttattctacccttattataattgcatttatacaatttttaaaaactgatgctgaatctctagtggaaagagtactggactgagtcttgcattatgggttttagtcctgattctgtactcactaatttttttctaccttcctcagccactgtattcagtatttaatataatgagcgttctggtaagttctttacatacattatcttatttacttttacaaggtcaggggtgacattgacccaattacttgtcctttctaggttcttcttctgctttgataagggtgtcgagtgttctctcggtcatttcagcaatagtattctaaaggaatacctcccacaaattgttttctaattttacttcgaagaattccagagatgacagtcctagggtgttcatgacactggtagacaccttcccctccccttcggtggccccgatcctcattccgcctccacccccgtgacttcctctcctgcctccttccaggatggacaacccacgctcagccccactctctccttgccagccctgctccgacagaggctggctttccccatcaggtgttggttagcacttctctgtacttttaattatttttcattttgattattttcgctgtgtgttgggaatcactatgaggtagagagaaccatatcaaagacattactctgcatgggtctgtcctctgtcaagtccaagacatggattcattgtcatctcttatattttttggacacaagtttgatgaggtttcttaattttgacagttaatgcttccaagaaacttaataaagattctacagccattttagtaaccagggaactacagtggaaatatatctctgagtaataaaatccatcccctggaagctgtcaccaaagactcaataatcatgttcgccacccagcatcctttctggacctcaagctgtcttgtcaagtgtgcttaatatccaggatatttagtttaccacagagttaactcaagtatatttgtgttcatttccatgcaggattttgcaagtcaccaagacttaagataatggaggttttgacctctaggtgaacaattactttctttcttttcatgtactgaactcatgaaaatatattgatgaattaataaatggcataccttttataccaaattttaacaaaacaaccttaaaagaagcttgaattgctgcgtggacaatatggacatcatgataggaaagtaaggcattttagtaattaagttaaacagctattttgcccccataactcagttttccttccaattttccaaccccaattcagaattactgaacctgaaacttgctgagaagaataatatgtagtcagcttaatttccccccttgaatatgcttaagggaacaaaaccctctcttcttggaggaattcccaccatggtctctggtttttcctttccccctcagctaccatattaagcatttactctcttgggcattctgctaggcttcttgtaaatatcattttatttgctcacaagcactttatgtgaatatgaggcacctggagcccagagctactgcacgcccaaggtgacagttaggaagcggcaaagccaggatttaacctgtgtgttagaagtccatgctctcatctgttgcattagaaaatgtgctgctcttgacatccatcttccgggtcatgtaatcaacatcacgtatacttggctctctgttaccttttgcatttcaatacaatcccatagcttggagttcaaggtcctccaggatttcagtcttacctactgtctccactttgtcattactccagaggttgaatcttcatcaggaagcctaaggtttttatccccaccgagatgtgcctgccatatttgcattcttgataaaaaccttatttaggattattcattttcaaatcttcaagtgggtgaactgttgtttggtttgggtttggtttactgtgtaatgtgatgcctcgcagaacatgccatattagggcattttgatgtattcatttgttcaaagactggatgcattcctttgtactggcctgcacatatatgtaaccagttccttcttgatggacattaggttattttgaggatcttgctattgagaaccatatcataacttatattttgtacacgtgcgtatattttgtgcacttgtgtgtatatatctgaaaaatacagtcttaagaatagaatgtgcatgtttcatttcgaaagagatcaaccctgaccccctccaatcctccagaagttgaaaaggttgtcaaggtcctcattttcttaatttggtgttttacgtttgggtgtcctctgacatcggggttcaagtgagttcattccgtggctccgttgcactacccagcacccaatagcattactaaaagctgagtggacctctcaaaatccaggggctgcttgtcgagtatttagaaagggattgaaattgtaggcatgtgtttgttgtagccataaaagtatcttctcaaatgtatttgcatgaaattttaagtaagtctagatcttttgagtggaacagactgatacatacctgccagagaacagatactgaggagtcaaatacagctcattagaagacacacagaactgcatggggagaaaacacctgtcccacagccttgggtatggggcttgctggagcctccacatcctggactctgctggaggaaaaactgaaagtaacccgccagctgccagggcccactcccagcctggagagccaggacagccaggtctcggcaggtgctgacctacaaaaaggacggtcctgctaggtgaagtgtggtcagggagaggcagctgcaggtgatcttggaaatcaatgctcattaattatcaacgtggctagtaaagctctggtgggaccttggttctcaatcctggctgcacgttgaaatcacgcgggacgttttaaaagttctgatgccaatttctaatcccacttgttgtgcaataaccccaatccccctcaaatgcctccaaataatctgagtcacatgtgcttgacacaggcttttcagctttcatttcgtttctgccaatttcttcctctcctgctccatctgatgccacaagagaacagcctctggattggcaagtgcagactaccagagtggtaaatgcttgcccaagaaagaccccagttcacacggtcagagggtgattttctccacctttctagacctgcaaggattcaagtgtcacatctggagcttagctgggcaattttgcaagcttcccaggtggtacatgcagccaaggctgagaacaactgtggtagggctgcagccagggtgaggcccactgggtccagcccccagagctggcaagagctggccagccgtaaaggccccagcaaagcagggcatggtggtctctaactctgactatgaaactggtgatgaagacagagccagtccttctggttttcggtagcacagtagggttgtcaagggttgtcaagggcagcacagagccagggaggtggagctgctgtaggactcaccagagaccacacagcaaggcaaactccaaatcgatcagcctggctgctaatggaatcgtgtcctaaccaagtttcgttaggaaatgtgtgcaacttcgctgcagggcatggctccagctgggagggactgcaggaaatcaggacctgacccacctttttctttccaattaagtggatccagcctgtgtacaccaccggggatgtggctggcagctcccacctaggggttttcaactattgccacacctacttgctaattcagctgctttatcagctccacatggttttttttgttgttttttgttgttgttgttgttttcttttcgagacagagtctcactctgtcactcaggctggagtgcagtggcatgatctcggctcactgcagcctctgcctttagggttcaagcgattctcctgcctcagcctctccagtagctgggattacaggcaactgccaccacgcccgactaatttttgcatttttagtagaggcagggttttgccatgttggccaggctggtctcaaactccggacctcaggtgacgcgcctgcctcggcctcacaaagtgctgggattacaggcgtgagccaccgtacccggccttcagctccacttttgagctagatttaaatgccgaggattttattagtataaaaaataatattgtccatatttttgtatcatgttattcttgtatctgtgttattgtattttattaatttagaaatggtttatgagtcattcaaaaagtgttcagtagcatattaaatattgagattattaaggcaatttatacccaaatagatttagaccttcagtctgaatttcttttggtataataacttttattgtaaaatacaaaggttgataaataattgtgaagatacattttcaaagggaaaaagaatttgtaggcctgaattattattttaaatctataaataatatattttacagataaatagatattgcgatttgtttttaagctgtcatgaatcaaagaacagcctttctcagataagcagaaattgattaaaatagacatgatttcagatttttatttatattatttttctgttctcatgcctaatcatgaagttctacaaagttccacatttaaaaaaaaatgtttggcttaaaaaaaataagatgtaaaatatttgtttttgaaaacactgaggccatatcaggaagggtaattgggaggaaaaaattaggtcacaatgagtaacaaaatagtatttgtttctgttttcacttgctctgcaatagccataatctccctcaaattcctttcgatatctcagtcacatgtgttcatggcacagccttttcagcttccatttggtggctgccaatctcttcctcttctgctccatctaacaagagaatatcctctacgttggcctctaaactaagtccccagttcacactgccaaagtgtgaattttctcccaggtctggacaagactctgcctcaattcccatccagcctctatgtcagtccacactcagtgggcgctggggatggttattaagggacctcgggctcttccctcgcttgagttaagaagctgcataggagagagagtagagctaccttaagatctctttgaacctttcactcctccaggaacgatgcgggctggattgcaaaactatcagattaacagataatacagttctcaaattcattccacctctcagccactggcccgtttttggggccttagttcaagctgggcccccatcacacttgaattccaaacattgtgaactagataggccacatggtttagagacagaaacctagatttaaatcccagttagtagcgttagctgagtggccttaggcaagtacctgaaccattctgaggttcaggattctgactttatttcctggcagagctcctgtggtgatttggtaaagtcatgcatgctcagggtatgtatgtatgtacatgaaccaaagatgctggacaagggtttgcaatggtgacttttttttaacagaggttaaaaagccaaaagcatgtgttgagcctctcctaggtgccttacacgtatgttagggtctatgggggtttaaaaaaaaatactaacaccaggtccctatccccaagtgccaacactctaccaaggacacgcatgtggcaagtgctacatggtctcacatacagaatgcagacaaaagctttagaaaggtctgatgaagaaaagccctccagaggagtgacagtttctggagatgcacgttaagtgctgtctagggccaggaacagcatagcagaggcaccaaacagggaggccgcgctgcctgcgcaggaaacggtaaatggtttggtggagccagcgtggggcaggggctggtagggggcgctgaggacggcagaacggaaagggccctgggggagagaggtctgactacaacccaaagaacgcaccaaatctcagtgaggaaccgcggatggggagtgacatcactcatcccatcagccagtggatatttattggttgcctggaggaaccagtaccaagaatacacccataaaggggtcaaagccccacccctgtggagacccctgtctcagggggaaaaaggggaaatggccacaaacctccatccttgtgataagtgttgagatccgggtaagcacagcgcactagggtaacccaggggagaggcgctggcccagcgtggggtgagcaaggagggggctcaaattcaagccttcaagtcggttcaccctgtccaggcttcgggaagctaactggagggagggagcctggcagaaaggggaaagctgggaggagaaacatcactcagaggcctctgtgacggcccaggcgaggggaccagggaggcctcatttaggacagtgaagatgagaatggggcgacagggggagagaacgaatgaaagggcttcattgcatctaaggcaccattagccattctttaaaaacttccttcaatacagaattatttttaaaacgttatgattctaatataatacaatttctcttatttgaaatcttcactggtttgcccacaagcgccccgatttcatctaaatccgagtgtaatgaaagacagatgcattgtttggagtaacacagaagctccaattcctcggctgcagggcttggcgcggggtttctgggcagcgtcgcttgcgcccggcacatgtgaaagggttttgtgctcgtttcctctgcatctgccgagggcaacactgaatctgtcttctctccctgctctcctctttgactgttttgtttgttccatttgccctgctcaacaacaacaacaaaaaaatgtagattagaatcggccctttatttcaacagcagtgaaagaattattttgttaattggtatattgataccccaagaactgcttactgtgccaagttattaagaataagtagacgaggggcagattaaactttgaatcacctgttcctttgggcaaaatacataaaccaaattgactgcaaccaaatgtcatattatttacatggcgtgcacaatttattttctaaaaacgtgctcaacaaaagatttgaatttgctcttaagcgtctaatggatcccacttaatagtgaagctctgtcatgtgcccttctgtataattaaatcatatggaaaaatgtcacaaagcaaaataaaatgtatttatttcagccatatcttcccaaagcatgacatgaagtctgaaaaaagaatcactaagcatttttatgccatctgtgctggtaggggatatgtttaccaagtatgtcactgtaaaatattccattttgaattaagcatagtctacttattactatatagtgtctggctgaatgagtataaaattggacaaaattccatatctgacaaaatactttttatttgttattttgttgcaaacctagtccaccgtaatgtcctttactgaattccaagaaatccaaagaaagaatcatagattatatttgtgttaaaaatctgcatgcttttctatccaaataaagttcagatcatcttttccaacagttgaaattatagcttctcattagcagaatatgtctcactgtgacaacttggatgatgatgctattgggtctgttaatctctattgcaaaaggagggctaaaatgtctgcacaatcaaaaaagctgttgttccagtttgctggtaaaacacaaagttatatccattatgatttctacctaccagacagaagaaaccttaagcttatagtttgccattattatgattaaattttatgaatacttatagaatttttatttcctatatgcgataagccctctttgtagtttgttaatgagatgtaaaaattctgtaaatttttcggagggcagtttgatcgcctccagaaagcatcagagggtcgcagcttaatcactgattcattaagtaaccctgatctatgctatatccttcagggttctttgccaagttgatatatcatggcattgttttgagactcatgtgaataataaaatgtaacatagtttagaaatgaaaatactttataactatgttgagctccttctagttgtaaatcttcccaagtcaataatattcatatcaaaattttcaaatctagctaaatgaaggagatgtgacttggtaaaaagtaataacataaaattgtatcattttgatcatgattaaacaggaaagctattatttttctaaaatgaaaaaaatagaaattttagtttgtcatagaatcaagggctagattcacttaataaattgtcttgattctgctcaaaactctgaaaaaatttaaagctctgtaaggtttttgaagtcccacttcctttcaaaccaaccctgctatctccttgaagccatttttgacaataactgcctgtgaatgtgatttgtaaactattagacagcacacaaaagtgaactgctgtcactaatcatataactatcattcagattgtggcagctactctttccgatagttcccataggtttccaattgaacatagtattttttgctgcggtgtttgttttatcaattgattgtatgtattttcatattattttgtacactgtctttgaacttgaccttaaatattttctgtccatggcatatcccttgatgtgattacaggtcaaagtccacatcatagatgcctaaagtatcctgtaggaaaacagaatgggcactccaataaacatttattaaagcatttggccgggtgtggtggctcatgcctgtaatcctagcactttgggaggctgaggcaggtggatcacctgaggtccaagaccagcctggccaacatggtgacaccctgtctctaccaaaaatacaaagattagctgggcatggtggcaggcacccataatcccagctactcaggaggctgaggcaggagcattgcctgtccctggggccggggttgcgggttgggggtgggggtggagtttgcagtgaaccaagatcacaccacctcactccagactgaacaacagagcgagactccgtctcaaaaaagaaaaagaaaaaattgttaaagcattgcatgaaatctgctttaactcctattctaataaaacaacaacaagaactctgaaaatgactttcaccataattagttgaaaatgttactttcctttggcccaactgtatgtaattcattattatatctatgtctgagactgagtgtgggttttcaatataatcaaacgaaagaccacctttaccaaaagaacaaatttaaagttcttttattcctgtgaaccatattctccaatcatctacactgaatattttaaatgggaatttttgaagtgttaaatatttatcaccatgtttttctttcctcatttatatggagtactggagcttgtggccataatattctaatgcaaaatatggatcaactttcagtctgaaagtttgaaagttaatacactgattttaccacctgcaaaagatatccatatttgaataaaagcgaccagaagtgaagctaatcaatttaataacacatgcagttatttcctctttcttttaaaacccagaaggaaagtggggtccacatggtcctaattgtgttattagttcttagttttcctctaggtgctcttctaagtcttcttttgagcaaatatcatgaaaagctcaagatgagaagcagtgttgatttgaatgaaaggctaatcccagttgtcctttttctaattgataaaaaccatgatgatcaggatgagtctcactgaagcgtgtattatgataaagtaaactacggttcatggagtcacatttgatgttcagggatctcatctgagaaggaaagagagcacctttcctcagcctggagaaaatgaggcgtcggtgggagcaggcagagctgcatctgtcagtgtgagtgaggaaatccatgtctgattttccaaaggaagtcaagattcgggtcaactgtggggcgaaagaacaaagataccactggtggttcaggacgagaggtgcgggttgggaatagccatggagctggacgtgtggtactgaccagggatgggggaattgttgttgcgggtgtggaactggccccacttcacacggctgcgtgctgtgctcctacggcagccaggctgtagagcaggaattctcatgtgaccactggtttggttatcccagattaggaattagcaggaggagtgtggcaaaggccatgtctagaatgtgctaggaggagctggccagacggctcaggagagagaggccgctgggcaggctgggcggggaggggccatacagacttggggagcgccttcttctgctctggttgcccagccagccacaaactgggtggcttccacaacactcgtgtcctttctcacagtgctggaggccggcagtccagggtcagggtgtcagcaagatcggtttctcatggggcctctctccttggcttgtggacggccactttctcgctgtgtcctcacagggtcgtccctccgtctgtgtgttgttgtctgtgtccttatctctttttataaggattagagcccacccatgtgacttcatttcaccccaattacctcaaagacacttctccaaatacagtcacatttttcggaggagctggaagtcagggcttcaacataggaattttagaggctgaaaggtgacagttcagcccgtaaccagaaaaaggcagttgccctgcggggaagggaactgttgaggggtgagactgctggaggaagaggaggctgtggcttagagcggggaacaagaggtcccccaagagagatgggacctgagtatgagttgaaatggcctgttccgtgttgttctcaccctgtaaaatccctgagggcaggaatcagctttctgcatctctggttgcctggcccaccgtcagctcggagcattaaactatagggactcacccctgctgaacatcagattgagggtcatgtgcccgcaattctctccaggcaccactagagggcgagcctccattttgaaaactacccagaatcccctgctcccgctggggtcaggaccgcccctactctctcaaggactcaccctactctgttgtgccacacaagccgctgccacagggttcgccctgcttttattctaaatcttatggtagcttggaaagtagcctggcatctgatagaaacagccctcaagtggtccagcttcccccaccttgcactgccgggcagtctctatttgctgtcgattccacgcagtctatgcatctgggttattttcacttttccaaaaccaactctcagccgattcactgatcttctacagggttgctccagttcctacttcttttatcgcttagacctttctttttattccctccttcattctcccactccttttcatctgtagtctcttcttaccagtacgagtccgtgttacttcatttgtagctcctaatgtcagctcatcaaatgaactatagtgaagtaaaaggatatcgcctagtgctaggttatagcaaaactctcaaacagttagacttgcttttctgcaaaatgtgagcatgtagacttttgcatcaactcatagtaaactttaattttgttttgatgtctcaaaagatttaaaatgcaggttcgaccataatttttaaaagcaaagtagaacatgctggctatattatgaatccattcaatgacaagtagtattagtgactaaatgatcattataatgtaatgttagctgcagagaattttgaagaaagataaagaagcttgccacctagtagtcaagatgagaaaagaaaagaaaaaaaaaatcacagatcaaagggggaagtcccaagagagcatccccacattgcaatagccaagaagagctggcattgactgagtgctgactgggcaccaggctgtgtgtccactaagccgtttatctgcttttgctcacttattgtatatctttgcccctccgtgaggcaggtatgactgttctgcccattttacagatgaggaagctgaagctcagagcggttaagcaatttgcccatgaccacacaactatctgatctaaagcataggctcctatctactcccaatgatgtaccaatcctagcacgattatagctcttctcaagtgcaaaaagttcaaaattaatctagagataaaataacttttccccccagtttctcatgagagtaactaagcccttccatcagctgtggccagctgggcagtgataaggtagtagatgtatacagaggactgaaaagaggagaagaaacacagacagactgaaaaacaactgtctcctccctggtggagcatgagcccatgggtcgggaccctggactgcagctggcccaagtcggtagcactgcctgtggggaccccttctgagagtgtggaaaagtcagctttcccctgtgagagcagctgggtggggaggggacattttccatcacagactctaccatggatttatttttataccaaaataaacaagaagtccatcaacctggcacaaaagttaatggacctgcccccagctagggccctgtctacctggggtctggccccgtaagtgtgcaaattacagaacaggcttccaaacatagaaatatctttcactgtaatcccaggaagctctaagcttctacattttattaagctgcagttattattttaaaacaaggccaagtgcctcttggtatatacttaaaacctgcaaattgctttttaatgtctcagacttgtagccagcattggaaatttccagttcctctaccttgatcagctcagacatttccaccccctcaacctaaatgagcagaccttaacttcacacctgattctctaaagaaagctaccaaaaatacaacaaagatgatgggatttttgttactttaattattttaattgccagaaagtatattttgcttaagcattaggagaaacagaaagttgccccagagaaagcctctttgattcaggccgtggaataatttgttttagtgtacacatgcacacacacacgcatgcatgcacgcacacatacatacaacctgaggaggagtaaacacttttgtggatttttcttttctgggaagaagaatgcagcgttcattgattaacacaatttcttgctctcttgacttctggtggatcctgaaacacatgcgagaactcacatctgggggccagggagctgggctcaggacactgtgtgacactaagaactgtgcggtctccagaaagttctaaatgtcattggcctcaattacgaatctctaaaacagagactggtgtgccaattaggttttaaaatattaaaaaacttgacctaatcatttgaattctaggagttaagcctaaggaaatatcaaagatagaaagaggcttgaatgcctagatattttcaatctgtttttaataatagtgaaaaatgaaaataagttaaatgtctaccaatatgaaaatggctaaatcatgttttgttctcataatggaatattatatcaccatttaaatgagtggagagtatctaagaacatgataaaatcatcatggtataaaattaagttaaaaaacaaggtataaaaccatataatacagtcttagttgtgtaaaaatatgtgcttgtgtgaatacacacacgttaggaaatacacctgagtggcaatgatggctatttctgaggagggagattacacaggatcatttttctttatccctctctgtttgccatctcttccataataaactgcatcatcaaaaaactaagttattttgaaaataaaaataatggattggtctagattatctctaaatttctttacaatataaacctctattccacttatgaaccaattaaaaacaaattagaaaataacagggaggttttggcatttccaaaaacagtggctccttggggtagagaccttccacacctgatctcatcccatccaggccaaaaccgtagaggatttgcagccagggttataaagatactgcaacccattttagaaaacgaagcatgaatgtcccccttagaggcataggtggtttctcctctagaccatggcttgaggcttttgagccctgcagtaaggtgggctcgtcctcactgatgagagaatcacgctctccgctctcccccgcaagtggcatatggtttttgcctcaggacctccagaacgtgggtgtggctgaagttgctgcttccttttccataggaaatattttcaaggtcgccctctccaccctgaaaactagagggcacctcaatgggtgtctgcaagttcccagctcaggagctttcacctctatttgacaggcccttcataagttcctagttaaaaccttggggttagagtgttggtgccttgtcctctccatagccaaaggcatcgctctgtgctctgggcttcagatgttaaggagaggtaaatactaaaggacgtcattgttccctggagcacgtatcagctgcacagttatgactcaaggcacaaaatctgaagtaatcaagtcgtcctttgactactctgtgcaagaaaatgcatgcctcagaaatgtgtagccacgcaccgcacttttttcaaataattctactcagctggaagtgattttttatgtagaatatcctttcatgattactttagagcaggaatacccaatcttttggcttccctgggccacattagaagaagaattgtcttgggccacacataaaatacattaatgatagctgatgagctaaaacaaattgcaaaaaaaatctcataatgttttaagaaagtttatgaatttgttttgggccacattcaaagccatcctgggctgtatgcagcccatgggctgtgggttggacaagcttgctttcgaggatcagtttgcttttcagtctgggcatagaagagagaagtgggaacttctgaatatgacccaaaacttcaggttcccagtgcctggtcatagagtcacagactccttattcttttgaatatcactttgtttttaccatagagagactgtatagaatcatagtgcaagaaagtgccttcaaaaatgaaccagtctatctcattgccttcaagctaaaccataccaaagccattgctaactagtaagtaagggtctctattttaaggaccatcgcaggagaatcccagactcgtacagagtttgtcaatcatcattgttgggaaactttttcatatattcaacttaaacctctcagaagagtttgtcaatttcttcttattcaattctcattcaaggtgaaaacagctgggcaccgtctccatcatcatcatcattattgttactgttaccatcactaatgccactgctaccacctgagacaccaaggacagtaggtgctttgcctccactgtctcattgagtcctcacagcacacgtaaataaatagaggggttttatttccacctttgatacatgaagaaactaaggctcagaaagacaaaatgtttgtccacagtacagcttgttgtagcagagtcgaaatatcaaccaggtggactttttgtacagggccatgttactgcgtcatctactttgtatgattacaaactttcttaatctccaataggtgaaattattttagcctctcatcctgtttcctaacccagaactctatacctctcagaaatggttgctgatatctgtttgaccactaggaaaagggggaactggactagtattttctactgcgttccgatctgccctcctaagataattaggtttgagctggggagggaagaacagctaactttaaagcttggggaacaatgtcagctcccaaatatcttaggggtggagccatctgtttgggagggacctgaagagacttctgttgaagctttgtttgtttgcagagggagcatagagtgtttactcaaatgatgcattcatttggggttggcttgcgggggagtgggacctgtgaaggctggggggagtggttaaaggacatcactcccccccagccacctgtgactctactgctcctgagggattgtggtaacagttctttctggtgggatgccactgaggctttctggtatccccggggttgtgtaaaagctctaggtgctgggaagtggtgagcagctgctggggtgcataagggggagtggggagggacggaatgtcgggagcaggtgagctgcaggtggaaccagggtttcctgaggcctggcctgtgatactgtgaaacatcaaggagtgtgagtccagggagatctgagcagcacctgtcaaaggaggaggaggaggaggaggaggaggaggaggaggagctctgcttctcaggctcaatttccactgaggaatcccagcatttttaactcataacccaagcttttgcctctgggtcatagtggatcaaaagataaatgggccttttcaattttgtatttccaatctcagatactcgaatcattcccaatctaaagcacagtttgtgtttcagttctctggtgcatagcccaggtaatgagtctattctgtttatttatctagttcagagatttgggcttctagtcaaagtaaccttacacaaagaaacaacaaaacacaagtagacccgttaagagcaattgtaagatgtcagtttctccgtcttacctgccccccaccccccaacttgtgggggtttcttctatagtctgcatagagaatctcaccttttcctttgaacggcctctttatttctttaggcagtcatgactgttcttggacacagaaggtgatcagaacaaagatactaacacttcactggttctcttttcctgctcacagttgcttcaacaataaaaattgtgcaatcttgatataagtcacaaagtgtaaaacattcctattctttcataagtgacacttttccctattaatggagaacaaaggaagaaacaaccagacagaaggaaaatgctcaccacacaggcagtaaactagccccgttatgcccttgactcttttgcttttgattatcatttgtttactcaaatatttattgaaacctaccaggctaaaaagcattgtgctaaaagctggaaaagaaagaaaggggggagggaaagacgaaggcaaaaaaggggagaaactcagacaaaattcctgtccttaaagagactgcagtcaagtttgcaaagttaacgtatgtggtagaccgtgagagtgattcagatgaaatgctcttggagcctggctctagagatgagagaaggtttcctaagacatttcacttggacttcagacactgggcaggtggaagaaatatattctaggctaaggaaatagcgtgagtaacgtctttgaacataaacaacaaatttgcagccgaagttgcatggaaaaggctggagagagggaaagtcaagaaataatggagggtgttaaatgacaagcccaggaatctgggacagtcagctgtcgttgaatactgacaaataggcaagtgacatcatcacacatgggcttctgtttggaggggagtgacagccctccataaggagtttagggagttgaggtggattcaggtgagccagcctggagactgttgctgtatccgggacaaagagcaagaggcagaactaggacagtggcagtggaaactaagaggaaaataaaatgcttaaaacagtgcacagaaataacaacataacagacgccccaaggcacacacagcttagcagttagttacacatacggcccagggagatagagacagacagagatatttgggagtgtccacatgaaaccagtaactggaaatgttaaactgagtacaattaccaaagatcttctggtaatgaaggaaagtgagccaggaacagccctctgttttcgagcatgtccatttgagagagggatggagacagaagatgagcctgagggtgacttagaaagtcagagctgggaggagaaacctggaagagtctcacatcagagaaacctagggaacagagttttcagaaccagggtctgagtgacaatgtggagagctacacaaaggaaagaaaataaaagaccaagcgtgaagaaaggctccaggctgtggagggtttgtgctccacaagttacaggaggctgcggggacagaagccaggcaacagggccaaggtgtggcctggggagtgacggatcataaagccccctctcgtgagaaactgggataatggaaggagagactaaaagagtgttagctaagaaattagaaaagggatttttttttttttttttttttttttttgcgggtgggattcgaccgtgtttttctgcaaggagaagagtctgagaaacgtgccctaggcctgtgcaggttccattccaagcacgtccaaacagcacacatgcttccaaacagcacacacgcttccctccatgcacccccaggtgggaactgtggccacaggtcaacgcttctcttccctgctggaccatttgttcaccacaggcacaaatctgctctgtcttgttcaccaactgacacttagaagaggctcaaacctggtcattggctggggactcaagacagaacaaggagtgttcccactaccaagcttccagaacaggaaggaaagttggaacggagagcagacggagctcagccaggagaaacacgaggccagctgaagccagtgggcctgtgagaaggagggctccctgcctggcaccagggctgcagtcccttgttgaagtgcatgcagaggcagggtctgggaatgctcattcccaccttgttgcctcatgagcacgccccatgcaattctgggcaccaccctcagcaacaagactagctctcagccaccctcacagctcggcgtggcacggacgtgctgatcttatggtcagagggacaaggggaagtgctgcgtagactccaactggcaggggcggatcttttgtcctttccttctccttcctgcagcctggaactcaaacgagaaggcccgggctccggcagccacctttggctatggagtaatcttgagacacagacacatgcaggaaactttagtattaaagtaggagaagccccgttcttctctgacttcatagagccgttgcactttatggtagcctggttgcttccttctggactttttctgacaggagagaaattaaacacctgtcttacctaagccagtattatgttgaattttctgttacatgcggccaaacttaatctttacattaatgctacaacattaatgaaactgctaggagaagctgccttgccaggctccccggtggctgccatcacatccagcacccggtttctcaaacttccccacacccaccacagaaaagcaagaactaggtacagtatctggcattctgtaggcactgatggtcatggaattcagtctctctggtgtattttaagttgccattcaaaaataaagcactcaggtaatataagtgaattttgattaaattacaagtaacaattcctattcgggttgatagagctctttctttaaaaaggctgaattttatctccttttatagaattaaagtttttacttttcatttgtgatgagctgaattttcaggctgatgaaataagtcactgatatttaccacacaggacttaatcaaaaagaagcttaggtttcaatggtgggtttcctttttgggcatggaccgtggttttatagtggaaagctttgtagcttggctcacactgatgtccgctgctcctcacatgtgcgtcttatcttggaggctgggctcctccgtaggttctcctgccaacaagcgagacagaaaggaggcggcagctgggggaactcagccttccttcccaccacacctgcaccttgctgagccactgctcccaagacgaggcacagaattcccagagcagcctggcttcaacctactcatttggtgttctttaaattaaaaaaaaaaaaaaaaaacttctggcaaatcgtggtggctcacgcttgtaatcccaacactttgggaggctgatgaaggtggattgcttcagcccgggaaggagttccaggccagcctgggcaacatggtgaaaccctgtctctataaaagaaattcaaaagtaatccaggtgtgttggcacgtgcctgtagtccctgctactcgggaggccgagatgggagaatcagatatctgagcctggcagtttgatgctgcagtgagccagattgtgccactgcactccagccggagcaagagagcaagatctgtctcaaaaaaaaaaaaaaaaaattttcttacatcactagttttcttgcatggcctatgagttcccatccactctgtaagcctttataagtgttatggtgggatccaagtataagctctgagttactgtctcattctcccccgttcacttacagatgacattctcgcagaccagaccagcaagtctccttgcccgaggccacacaggcaggaaccgccaggcaccccgtccagtgtcccagccgagccctcctgggaggttcctgtgtgctggacacatgcctggctggctattacctgtgtagtttatccagtggttacactgacttgaagtggtctttctgaagacgacattgactttgaaattacttgcattatccagtgatcagctctggtcattgtgatcctttccaagccatacataattttgggttttgctgtggctgctgaccagcatctctgtttaagagactgagctttgtgctagagattctggttttgatgcatttcctaggcacgcccacttctccagtagaaagccaggagtgagtccctcaccgagctgatccttgtgaagatgaacagttctctccatttgtgtttagtgacaagtatgttcgttaaaatatcacgaagccttcacaagatgttctactaactagttcgagacacagcttgtatactgtgcactgaatgagtttgcataggttgttacatagattatcatacacctataataaatagagtatggaaaacactgctaaaaagtttcaatgaggaccaggtgcagtggctcacacttgtcatcccagcacttcgggaggctgaggcaggaggatcgcttgagcccaggaattcaaggctgcagtgagctatgattacgccactgtactctagcctgggcaacagtgatactctgtctcaaaaaaaataaaaataaaaattcattgagtttaagaggggttttttgtatggttacaaaaaaaaagcagtttaattcctttactcttatgagccacttatttggttcttcaaacatgtagaggccaaaaaggcactgtttctttaggttaaaaaaatgggcaaaaaatctgattttatgtttcttttctcaaaaattattcactaattattaacagcaaacgctgcgtctcctggagtcaccaggcaccgagcgttgtgtgtgtttcacccgcttggcgttttcattctcatttcatgtatttgaaagctggggctccgtacagttatgacattgacccagagtcactcagattgcaaatgacagagccagggtgtgaacccagataggtcaacctcagcctgagtgtctctaactcttcaggttaacagccttctccggataccaaagcagcactaaaccatctattcagctgtgcgggcacctgtgtgggatagaaggggctgagggatcctgctgccacattgataactatcgctggaaccagggtctgaaaccgagtcagactgaccctgaaacctacttgcctgaccattttactcccatacctcgggctatcttgcaaaggaagggttaaagaatacgtgatgcaacctcctgaaacaggcagcctaggaactttgacccacacactcagccccgatctctgtggccacctctgtgatacagacggccgcttggggacagcagaggctcaggggcagtgaaaagcagtgccggggctggagatgaaagagccaattctccattcttctgtgagtccccggagatgaacactgtgaacttgttcccagtctctgtgtctcgtgccagcggccctcccctcccccttccaaggacaagtccacccccagaggatttgcccctggaaatgggtcctcatggacaggggagaatcagagattatttgcttgaggtggcaaaaaaaaaaaaaaaaaaaaaaaaaaatacagacacatctccggccaaccctttttatagatgtatttttgttttttacaaaccaaatagcagaggttgattattagtacagtagtttggggttttttctcatcattaaccacttagttactataaatgtgttttaactcacggggaaaaagtccagcataccgtaaaacctgagtcccacccagccagctcggaatggaaggcttccaaggcccgggaggcgcgctctgtcaagttgctgattcgggagatagcagtgaatcggggttccaccacgcccccagaatactattcacagcagctttgtcattgaccgttctcccttttggacgagatctgaaacaaagcttccaatcacttccgatcctaatagcgttacctctcttaggtagggtgtaaggattcttagtcaaatttcaactcaagtaggttacctaggaacattcttagggcttaacctacttagttcttcttgcggtttcagttgaaagtgatagactcttccaggctctttgtgttccacggtccggtggtgaaatcactgctatctctccctccttagagagcccactgcttcccaccaatgagttaagtagtttttcttgcccatttctgcaaatttgtgttcataaaatcagttgatggatgaaagttactgaagaaattgctaacaatttcgaggctttccttaaattgatagtttgttttactttattctagttctcagtggaaacaaaaggcaagaatgatctttggaatgttctgtttacaaaatcaacccaaacaagatatagatgagactcattgtcttcctccagaataacaatcgcctttaatttctgtgctgctgaaacagtcacaagagtcatgatagatccagaaagagacccttggtgcttcatgtggtatctttctttagtacgggtctcttttacattcagcaggtttcattagaaaaaagaatttcaaagtatttcattaacaaaattgagaaaatgcgtatttaaacattgacatccttatgaaagagtaatttcttacataaatgtagcattttcacctatgttacctcatttaatcttcagaactaatcttaagttgcaatttcacaattttatagacaaggaaatggaaactcatagatgttaattcactcgttccgggccacggaggtgtactttttagagcatagtcttatttaatggtcttgactctaagtccaaaacagaagcctccactttgctgagcaccaaaagatcgggagatgagtcagtgtgtgagtcccaagaggaagagaatctgcgggtccttagcagttaaggaagcgtcatgaaacatttcttgaagaatggataggatttaaatagtttagaagatgcagtcttgaaactatgtgggtgatccaggttgcatgagcaacaaatatttgttggacaattgaagagtgaatgaatgaggacggagggtgtctgagatcaggaaaatgatctgggaaggtatgaaggcaaacattcccacgacgtgttcggggaaccgtgagtaggagccactggctctaagagagtgtccctctggacaagtagagagagatggactgccatgggtgctctgggggctcgaagggcatggaagggcatggaaggccaggctaaaaagtgttgattttgccttacagattaggtcaggtcttcattgcttttgactaaggaactttatcctgaagacaagatcatgggaaatcattgacaacttgtaggacatgatatgaccaaactcagtgttttaggaagatgagcagggagtgaagcacaaaacagatgaagagtgtgtgttgactctggttttaggaactcaccctgtgcctctctaaagcttctgtcagctcttcccatcagtgggaagcagatttagaggccaagctgcctagaagacatagggttaaagaaaaaaaaaaggaagaaaaagaaatgcacctttaaaatttcccaaccttgatttatacctacagagatgtatgtgtggtcactccttttattagggtttttaagctaatcagtaggcttgactaaagaattgtaaaactttcactacaagaaaaattaaaagaagtcatttcctgtatctaaaatgatcacgtatacttctgaaattaggaaaacgcaggccaatgataaaaatataactgtaacgaaactgtaggttttttactgattgtattacacaatatttccttttggattcttaatacaaagcaatgcaacactggtttggtttaaaataaaatatggagagattcttgttctgtaggaagctcatcactctaatgggtgtcttactcactggaacagtattttggctgtactggagcacatcgaaaggaatgagatttagctttgccaaacttccactgtgaaagagtttgctacaacagtgttttattttattcttattgaacttcagccagttgaaaatagaatctcctcaccatccttttaaattagccttaagctgcagataaaagacaaaaatcaatgtgcaaatttagctccttgtgctcggttccttaagaaatttaccccagtgctaatatgcaggatgcatagataatagaacatagagtaactggaagttttaaagtagcatttcttgttcagtttaggtctacttaagagtctggtaaatcctgtacataaattgtttctttaatgctacattaaagacagtgcatctctttatactgtccatactagctcagtaacactgcccctgataacatttcatgtggccatgacaaattatggtgaaattttcagtgtccaattggaatggaaattgctagaaaaaagcggtgcctaaataatggtgcaattctatttattccatttcactaagaattactaagggcttcgaaaacccaaatcgaaaaaggaagcacataaacaatgttcgtattggccatactagcttgaatgtctctaattgttctaagtggtacaggtgctatgagctcctaagaatatccctgtgtttgagaggagttaactcagagccttgggttgcttgctgtcctgccgcactgcacgagaaaggttagcaacataaagaaatgcaactttgcctacttcaggcattaatataaagaaacctacgtacaggcacccagagacacaaaaagagagagaaagctcaccattcttgaaaaaggcagttctgcaggctccacaaacaagtacaccagtgaatgggaatgataagaggagaacaatttggttacattcagagacctggtgggcaaatggaaatgggacaagcagtagaaattaggccagatcatggaagatttgttttgttttgttttcatggcatgatacctgcaaggccaggaaggctgaagccagaacaccaatgcaattaattagcagaaaccaaaaagtaattaatttagcacaccaccatatagggcagaagcaaatactgctgtttgtagccagggatggggaaaggatctaaccacactccaggcacctctgcacatggcaccacagagagaaagatggaggaggagtgcagccgtacgctgggagtcatcacaattgtttttttaccgataaaagcaagtgggaacaattggccaaaacaagcctggattgtagtagaaaattaagctaagaaagaaagatcaggggacattgtgataaaacaatccacgtaatttctataacatggatccagcttaataagatgtcctgaagttcagcatgagtaaagttccaggacagttcagggttgtcataggaaatctacatttttcaaattaacaggacttaaagatgttactgttacttcaacacttggtaaatttcactgcaaatatataagccattttaaaggaaagtattagataatcaaagaattcgttaagaaaaagaacaaattgagtgcccacaatataaatggtggccctgctgcagattagttcccgatgcctgagataagatgctggaggaaatcgcggcatcatcaatttaatcccacacaaaatgcaagcgaccaccttagcttagttgcagttgtggtgggcatgaacttcacaggggcataattgaaggccaaaattaaatgctctttatttctctgtatctccgtgtaatgtcctgatcctgagccccagactgcctcatgggtccagtagggatgcctctcagcaggttgtgcatcgggagaattttgctgcattgagctccagagctgcttccctgtgtctcctctcccactgctgaccccacccccatctactctaagccccagcaaatcaccccagcactcccaggcagtgagtgggggagggcgtgccccctcctctctctgttttggtccagcctatatgtcacagggcttctttaaacagtgactgggcctttctgctggccttcacttaactctcagctcagcttgcaggcaccctctgagacgcaggcactgcccccttatagaatctgcatagtgggctgcctagccagggggcttcgttgtgtggccttttctctggcaggctttcagatttcccccttcccccaagaatggagccaaggggtggaccccaacatagcctgctggctgcaaagctgcacacgcctggagagctgctgtccaatggcaaatggaagcaacattctcattgtctccactctcagacaccctcagattactgagggaattctctcgtgtgcccccttcaacacacaggcagacacagatacacacacacagacacagacacacacacacacgcagacacagacacacacacacagactacttgtcattctaaacttgccacctctgtcctcagcatggggccagtgtggtggagaggcctgttttgcctggctgtgcccacagtctcatctctcccaacttagattcttactaagagttggaactcttgattcctctggccgcttctggcagcctcttcccctggacacaccctatctccctgcccagtggagccgtcgcgtgcaggtgtgcatctctcactcctgccggaccaggcgctccctggccccatctcacagactaaaacatgaggctgttcctttgcttccgagtagtttgatgtcattcaacccagcatgcatttcctctccaccgctctgctccctccctggaggtgcttctgttcctacccgctgaggggcacagtcaggaggtatttagtcggcctcccgtcgccctcaccgcacacacaagaccaatttgacggttgtttgggggcatccactcctggggctcttgacattttccccgggctctgcgccatcagcgccctttcctgcccccacttcacgggctctgtctcctctccaggcacctgctctgcagggagggagacaccccccgtcctcaagctccacagggtcccgggtaatttcatccgtttcccttccctatcagtggctcccaaatctgtttttctcaaagtctgttttcctctgaacaccaaatcacagtttcaactgtatgtgatacaacacctgaacctcaggatggcctaaattgaactcattattgacttctcacatccgctcctccgttgtatgcccaacatccctccatagactgatctgttcgcggcctctgctggaacctcagtgtcaccttggacgccaccctcgcccaccctacccacgccagtcagtgcacccaggcctgtgcaagtggcctgtgaaaggcttctgtgctcgccgcccgcctttccagtggctcaggactggccccatctctttgcagcactgctgagaacgcctctcaactgagagcccgcgctcctcccctccatgaatgtatctgctttccaccccagacttcatcatggtgctgcaacgttgacagccccgtcacctgcagaaccatccaaacccatcggcagcacacagagaccctgctggatttcccagccccgaatcccaccttttctacttcaccctcttttctacctcactcagtgggtttcccatcccaaagtggattctcacctccatggtgtatcaaagtcctactccttctcccaggtccaaaagagcttctctggggaggaaccccagcatcccaggccatgagtcaggactctcctccagcactgctgtgacgcggcacgtgaccccacctgcgcacttagcacctcctgttacgcgcctgtccgctgatctgcgcctgtcatcacgtgaagagctccagggaggccgggctttctcccagtcccctttatattcctcgggtctagggcatgcctcacactaagtcaataccaaataaattgtccactcttcaacaaggcaggaaacatgaggggagagttaaaaagtcccaaaatgagcatatctctttgaaacaccccttacaatattagtttttaaaattctacttgttgagctatgttggagttgtgtgggtttatatgagtatcttttcctacagggaactatgtgatctgtgcaaatagagtccccacacacaggactggtttgcatcagaacatcggggaggcaggagccccaagtcaaccattctttgtatagaaaaagctctcccaagtcactcttttctttggcatgtgcatagtcatcttttaccaaatgtttagtcagtatcaaattcatttgctactggaaaacctgttttgatgacagttgttgctaaaaacctgtacctgatcaaaatgattgagcttactaactctaaattaaggagtgtctatttaagcccccgaagctacagtagaaaatctaacgtcatctcttagaggtgagcttgttaaaatactgacgtgatgcctttgtgagtccaccgtctcctttataagaatcaggccactgatcctcaggcctgaaggctcatctcttgggaaatagaggtcacaccaagggtttggtccgtgagtgagaaggtcgtctccagcctagaaaggtgaagactctttgattctacagttctaaagcgtggcctgaccgttttattttagtggcctttctcacactttgtctagtttcatttttgttacataatctgcataaaaattccctcagtagttacaattgcagtttagttcatgtctgacttggtgtgtcgttctgttgtgtttgagatctgaaaaactgtcgtcattgcccatccagatagcattcagtagaggggaaaggattcctttgtacaaagcaagcatgggcttaggatatttccacatactattcatttgcagacattgactaagaacaattaggaatgtacgctagaacgtgaaaaacatcttttacatttggatccatcttgtaagtgaccaacatacttttctttgaaaaaatagagcccatacgtttgtggcctaacaagacatgagaggataattgattaaaatgtcaaaggtggttggggaatgctgagatggaatgatactgcaggaaagatttcgcaaaaacaaattaaagtggaaattacaattcatgtataaagcccgtttgtatgatcaaagcaggcatcatctgtactgctaagttctacgtataacatagttttgttaaagaaaagtcaggcatgagatggacataagggatttgctgacaaatgcataacagctctaatgactaattttggttttagttagtgcaattctgtaggtggacatttagccagtttgttaacaaggtgttttaagaatgtcttccaggacaatttaaaaaaagagagaattatcttctcttacagaacaatgaaaaacagaattatctttcagggatggatgtttattacataacctattggagaataatggaagggaactagatgccttatgcccagcttattcattatctgatacctttaaaggctgaatggcattgccaattattcattgtggcaggggctgccatcaatttttagcttacagattgctagtttctcccgtgttctcttccatgaaacagcaacatactccattttgttctctatttaaaaattttacattgcagccctccaacaaattaattccatttaggtttcttcgggaagagatacaaatgagttttgtgaaagtgtacttaaatgcagccatccagccatcagcatcaacaggcagtcagctgtgcccagtgccatgcgcctgatgcccgtgactgacaagggcccgcattcactgtcccgggcttatgtgaatgctgacacactggtcaccgcagggcatactgcttgttgctgcttagttcatgcttgcacgggcagacccccaggtggcctgtcatttatttctataagctaggtctggtaacaccacaaaagcagtaacattcatttatatgaaggagaagtacataatccaaaaatcagaaaaattacttctgatagaagaaactaggtttcaaatgcgggtcttaataatacaactggattccgattgcattacattggttttctcttccaaataattggcaaatgaggacaaacagctcatccccatcctaacaggaaggtctgaatctgaagccttaccatcggtgactcattaggaccccattaagagccagaaaacttgcctaaatataatacaaatcgaatcttcaatgaggactacacatttgtaaactaaatttgaagtccccaaacatttacaagtacatttgttcttcataagtacagtcgtaaagaaaagcccagtcagtgacagtcaaccttgagcaacgttggaatatgaggtttgaaagtgaaaatagaggtcggcgcacaatctagttagtgcagagttgcattagacacaagtagtcagtgaccccgatgcacggaggaaattctgaaggttcaacatctgtctgaaaataatcgaaaggccctgcctagcagcacaagggactttcaagaatgggctttcctgtaaattttggatttcttttcttagagaaggtaaaaatgacctgctttctacttttcttctgattggactgcaatggccaaaaatatttataagaataaaagttaacaaaaacagtctaacccgtcagttcagaaccctagtaaaatttgttttggagcctagaactagaattgggcaaaagtgtagggctctttctcttataccaaaaagcccactcaaatgttctgtgagcccgctccaaagataaagtcagaaacaacttaacaacttcgtcttctttcactgattacttccctcgtgttctgtctattgctgatgatgtcctgacaaacagctccaagcacactcacccagtgcccgtgtgcagcatgcagaccacttgtcacccaatccatttctgagggatgactgtgttcctgaaacaactgaaatcagaaatcccttatttagcatttattagaatactgaatttaaaatattacatattatcatttgaaaaacaaaacaaacaaacaaaaaacctgttacttagattcaagttaaaagagggactatgtattcacccttagtccaggagaacagcttaaaatatgagcaccttttcctaagccattccacttaaatggacactagacctcaaaattgcaaacaataaatacataaataaaagcaataattaaaaaactaacttcaccatcatcccttcccgccaccccccaaacctacttccttcccaggcttcagatgaaatttctatgaatgatcccacccagtctcattcctcagctcagtgtcaagttccagtgtcctctgatcttccctttctctgacccccacacctttatggcgagtggccccccaacgccacgaggcctttccccttcactgctatggccgctttctgcaccacccttgggggaggtcacagcctctctgtgacctaagctctctcctctctaaagagaaggcatccacttaggtggtttatagggtttctcctagctcaaggatcttgagtgtatcgttgagctaagatacactcacgagctgagacctcctgactcaggcactgtggctgcactccaccaggtgacttatctgtggaccacactccacgtggccatctgtgcctatgctcttcctccacccatccaccaaaatgccatcttctccactcccactcagagccatgacgtccctctgcccccaggttgtccaggatcctctcatcttccatttccagccaccttttttctctaaaccctgtaacacttcataggagtccctcccaatgaaagccacaccccgcctggtgtctcacaccccaaagcagactgtaagcttcctgaagactgtcctgctcctcaatgtcccatcccctcccgaactgaccagcggtgctatctacggggaagcaccggggcagttgttgttgaattgatttcagttaattcagtttttaactgaatcacacaaaggatgtcacaagctagcttttataactaaagaaagcacagttgtgcagctgcctccagagtctctgggggttagagggaatgaaatagggaaagtccccagaagccagctgactgctgctcaaaccaggtgcaggttgggagaaaatctgtagtgaatgaaggaaaatgaaatgcacagtggaaaagaataccaacattcttgcaaaggaaccttaaagtattatttttgcaaagaatgcaaggattatttcagttcccttgttgactgttttgtatggtcttcctacagatactttcagaaaaagatctattgtttgtttttctctgtgctgacacagtatccattgtttagaactgtaatcatagcacacatagttgaaaatgtgggctcggggacaagctgtattttcccctctggttctttagacagtgaatactgtgttctttatctcttatcacagctcttttgtcaaacatttaatgattttttcccccagacaaatttgtagtttgttatcaaccataaaaatgtctattgccttatttttaaacatttaaactttggtaagtgtgtctcaagatgagcatgaattaaggtgtttatttcattttaaatacttttttttatcatagcgtacaaagctagagttctctgacatggatggcttatgtggatctctatttagacttgatgagagaacattttatttttgtactgtgtgtatttgcagggaagatggttaggctgactggctcccaggttgggtgtgttgggagcatctgtcaagggttggacaggtgcagacatctgtgacgtcctgcagtaggcagccatcactcgatttcctgcttaaaaagatctgacacacttcttcactccttggatctccattttttccaaatgcccgatacttcttaccattctacaacccttaaaccggatcccaaagtctgtgagagataaaagccttttttaaacccaataaacagtcactctttgttgttcctggttttaaaatgacaatttattgcttgatacagacatttgaagcctataattcaaatgaatatttataaaaataaatttcaagcacactggcatgtaactgcagggtaatttttaaatattcatttttaaggtggtgatagagtctagaaaaattttaatgtgccacgttatattttataaatatccaactatagaaatatgccttgtgtgctaatcatttccataaggcttcacttagattgagagagtgaaaatgggtgtcagtctttcaaatatccagaggaaaaactttcattttgttttaaatttgtttttgagggctgaatttaaacttaagacaatgtatgaagagttaaggtcagagttggtactttcaccactattccatttgtattgctttaaattctctgattaagtgtggaaaactatcaacaaggcgattgttcccaggggctgcccggccagaaataccgagactgaccatttttaagaacccagtgctatgtgcggaacagggcggcatggtggcctcctgagaactgggagggaaacactaaatgaagacgtgaacacatgggatttctttctttctttatttttattaaataaaaaatatttttattttgttatattgaactcgacaaattttcctcagagataatttttgtttcaatattcaaagttagaaattgtaccagcccgtcatagtttgaaagtattcctaaaagtaattcaaataaaaatgtattttaaatgtagtacacattttaaacatattggagaaaacatagaatcagagactttttcaaatccatgttggactaggaaactgtttctttttgtttctttttttttttttttttcctgagatggagtctcattctgtcacccaggctggagtgcagtgccgcgatctcggctcagtgcaacctccacctcctgggttcaagcgattctcctgcctcagcctcccgagtagctgggactacaggtgtgggccaccaaagccggttaatttttgtatttttagtagagacagggttttgccatgttggccaggctggtctcaaactcctgacctcaagtaagactgtttcttaatactaatcagatttgacaacagatgaggccatctgtgatggaggttctgcgcccgattacacattcccctgtagctcatagactcagtgctcctttctacagaggagagattccatagtcagtgttcctggggttctgtttttacttttgaagttccagaacttagtttcagttcttcctcttgatgtctctcttttgttctctccccctctctccctccctccctgtcttttctcctgtctccctgtcaccctccttccctcctttcatatctttctttcttcatcttgttatttccatctgtctgcctttcccaaggcaggaaaccccggcgcctccaggctggtggtgtctggctctgggctgcacaagccacaggccacctgccatcaagcacagaatggacttgacggggaccctgacagccagtcattcctgggactagatagggtgcagccggggtgtccgaggtgtttgtagtcatagtggcatacctacactgaagaggacagcttttttgtaagcggtggttgcttcactcatcaaaatagcctatttgtgaaggcatcaatgtgcaagtattttggagcaagtaaaatcagtcctggagattagaacatgcaggcctactgggccacaggaatggggctgcctgttgagactggagtgcaatgccccccaaccccacgcctgctgttcttccctctgctcttctcccttcccacctccttcactctcccctccttccccacgcccctccctcccttttggtcatcagtgcactttgcaggcatcagatatttggggctcttcaagtgcctcccctctacatcggtgtccacgggcttgctgaacagtgagcctctcctccctcctgggactggtcctcttcaacttgagccttgatctggagtcgatggtagagggagtccacttctcttgaccccgactctcaccatgtcaaaaggaggtgatgtttccaaaggtagcaattgaaggagcctctttatccccccataacagagaaagcatcggggatgccttggcctctcagccacgctttgatgattggcatttgattgttctcacatttcattatcgtgaaccactaataatgttggctaattgtttatttcatttataattccttaaatctccatctagtcttgaagctgttgcatccaaagagagtgctgccaaagagaagtttaaccacaggtgccgccctgaccacacttccaagactatctcctcatgtgggttctccttacatcatacatttgaccgtgaaacccatgaagacaggcgtccaatggagaggagtgttggaggcctcttccctttccacatggccctagagcccagtgttttcaatgtggtgtgactcccttttccagcggcgaaatcgttcccccgcttcccagaagtgtgctttaaagacattttgtgataagggagtgcaggtaggaaggggtctaacctcccccagggctccctgcgcctcggcggctgaggaggtggcagtggaggccgcccgacccccctctcagcctccctgtgctgcgttccctgccctgccgggaaatggagattctgcgcctaaagacacacagtcacgctgctttcaaagtttcagttcccacggccattctaaaatggcccctggagagctctggcttcctcctgcgccccttcccgcgcccgcccctgggtgtctccgctggctccccagcatctcctcccagctcgggatctctctcactcattcctccctccctgattctcgcctccattctcccgctctccagcagggcgcagctccctcttgctctttctggagaagcagggatcccagagaccccctacgagctggttccctcccagaccccgtccctccagtcgctggctcagtttccttcagtttcctccagctcatctcctgcccacctcaaaagcaacaggtccaagatcccaatcagcatttctcgcacagcgtttccgcgagaacgttccctgatcatctagagttagggaagtagaaccgtgccctgcacatgataagcacatggagactctaatcaatgagagctactatgattgctgctcacggacagcgcccaacagctctgttgtccctgctaatgacaccgtcgtccctcccctggtcaaccacgacccaaatgttaaagtgacctttcactcttttcgccaacatgtatccgctccaagacctctcctgtcctagggctactgggagccttacctgtggcctcaccttgctgtgcagcattggggagttgctgctctgcaccttagagatgtcaaatgggaagagtgacagctacttcagcagggtttgaggcaacattaggcaacacagtgtaaataaattacataacaatctgcttggcacttagtgatggttcaataaatgttacctgttgtcgtcgttggaactgttgacagaattcagtgagacttcagtgatggtttcttgaaagagtcacttatcatattctgcaatcaaagaaggaagagaggccaagaaataaacagatacatgtgcacatgacacaagacccagggtgagcagatgttcagaagacagagctaaagaaagactagagagacagacagacagacagaaagactagacagacagacagacaaatagataaacaggtagaaagaaagactagacagatagacaaatagacagacaaatagacaggtagatagatggatagacatgtagacagactagacagacagactagacagatagatagatagatagatagatagatagatagatagatagatagaggcggacagacagcttggtaaatgggcaaatgatagaaaatataaataaatatatgaaggagggagaaaactgaagcagaaaaaaagtaagaagaactcgtggtcattttactaaacttttaaaaacttgaacctaaaattttcaagataacttttttctgccaggaaaaaatacatatattagtagaatgtgtcaatacctgattttttccacagtaagagcatttccctttgaatacagtcataactggttctccgttagtagtaatcacagctcatctctgtggatattgttggtgctttcagttgctccagtacacatctattttgaaatcacctttagctataaaggaagaaaaaagaaataccatctgtaaatgcttgctctagaggtgtgtcataaaagtacagtcccattaacctactgtccttatgaaactggtggctattttcttttcttttctttttttttttttttttttttttttgtgagacagggtctcactctgttgcccaggctggagtgcagtggcgcgatctcggctcactgcaagctctgcctcccgggttcacgccattctcctgcctcagcctcccaagtatctgggactacaggcgcccgccaccacgcccggctaatttttttttttcgtgtttttagtagagacggggtttcaccgtgttagccaggattgtctcgatcttctgacctcatgatccgcctgcctcggcctcccaaagttttgggcttacaggcctgagccactgagcccgccggctattttctattcttatgttaaatgttctctctttaccttccattttaagggaattgacaagggagcaattcagagcaggggttatcttatctttcaaaggaacagaactggccacatcccagtagaaagtagaaaggatagcatccctgtccatgtcaggagcacaaaacaaaaagtacaaaaattgtgatgtaaaccacttgaaacttacaaggcagtacatagggatataatgacttcatcatcactgatgcaaagagaggtttctagatacgtgtttatctgtgagccccaggtccccgctaatctgtgctgatgtcttgaggaaaattggagtgagagtaaaaactttgattcactcacatactttcctttttcaagtaggcatttcagtctagccttggacatgcattaaccaaacgactggaactagttattcactaaagtgaccacagatttttaatatagtctgcatcaactgttttgattatgagaattttacttctcttttcttgctaatataatgagtcaagatagctcagtaagttaaaaaatattcagagtttgattatttgtttatcatttgttcaaaaaacaccatcaaatacctagattgtgagataaatgaggaaatcatagcaccatctccatactgcttatgcatcaggcacttgctctcagcactttacatgtgtgtgtgtgatttacagttgtgtgaagtggatggtatcattgttctcactttacaaatgatgaaagtgaggcccagagatgttaatttgcccagggtcacacagtgagaacgggtggatcggatgggcaccgaggttgtctggcaccaaggatctgtgttcctgttttgctacatgtagaaagtgtgttgccttgcccattaatgaggtcccagcatctgccccggtgtttgataataataagggcttaatgatcgtgaacccagaaaatctgagacaggtctcagttaatttagaaagtttcttttgccaaggttgaggacacgcccatgacacagcctcaggaagttgtgacgacgtgtgcccaaggcggttggggcacagcttagttttatgtatgttttagggagacacgagacatcagtcagtacatgtgagaagtacactggtttggtctgaaaaggcaggacaacttgaagcaaaggcaggaaaactcgaaacagggaggggcttccaggccacaggagatgaaatgaaaggttacattcttctgagtttctgatgagcctctccaaaggaggcaatcagatatgcacctatgccagtgagcagagggtcactttgactagaatgggaggcaggttggccctaagccgttcccagcttgacttttcccttgagcttagtgatttgggggccccaagatttattttcctttcacatgatcatgtacggaataaagaaatagatgaacacccatgatgttcaatgtactcaatgaagctctgagtacttaaagaataagaatgataaaatgtttcctgccctcaactaaattgcaggctgattcttgcagcttgagctaattcataagaaactagagattctaatccactttcaccagagggccttcagctaggacagaggctcctccagggtttgtgtcagccgctgttccaagtgaaaagtagtgctttgtgtctattcattccttcaaggctcatgacaaccctataacccagggactattatcatcccgtttgcctggggaggaaacccagccacagagcaggcaaggacctaggccttgatcacacaggcaggaaagagctgatcccagattcaaactcaggcagtgcagcccaggaggcctcacccttaactgccaagcttggccgcctctcaggcacctaatacttccctggaggagtaaatggtggaggtggggatagagaatggccagactgaaactccactgagaaggatgcctggggcagagctgtcttcctttgaactcctcgcagaactcattctttaacttagccccagaggcaaccacaattcagtgtggttcttttgtttgttgtgtgtctgtgtttgtgtatgtgtacagatatgtatctacgtgtctatatacatagatagctacaaacacaaatacatatttgtatatactgtgagggttatatttgtattatatgtaacatatatctctatcactgcctagaggaaggtcttggacattttaaacatcattaaatggcactatagtgtatttatctttctgcagacttgccgaagaatacaaaacatttgaccctaaaaagtgactctgctcactttttaattttaaaatgtgatcagagatatagtacttggatgggcaaaaagtgaaggaatttgctttgataaagactggcaaccagaggaatcttttagtcctctttatgtactgccagtctgagcctacaaatattttttattaaaaatacagaaaaaaaggcaacttttttttctaatatagaaaaggaaatgtcctaggtcttttagtcccctgggactcttgcatcacaaaatcaggaactgggacattggcacctcctgaggatgggaccacccagtgtgggcttatatatatgtgcacacacacagcacacttgtcccaatgtctacaggatgttctactccatgatctagaccatttgcgtgacctcgcgcaaaggcaacagtactaaccttggagtctaaacgccaagggtatgaacgtgggcacgtgtcgcatacttcccagttcatgcatactttccaaacaacgcacagccatgagtgggagaggggagaggattgaatttcgtgagcagcatgcaagatgtattgacaggactgcaccgagagtcttttctccaaggaaggtcaaattttaaccttttaacgttggaagtgaagacacctgatatgatcattgacaaaccaagaaatactaaaaaccctcaagagttgaagcattcttttacaatccttgttttagatacctttttaatagggtgaccaattgccccagtttgctcagcactgagaagtttcccaggacacagaacattccaggctgaggcaggatgcttggtcaccctacttctgcacgtcagcgtgcttgggaagcgccctgcaccaccggcattcctgggccccagaacccaggcactgggccggatcaggccccaggccccaggccccaggcactgggtgggatccgcagaacatgggtcctgcctctcagcagttcaggtctcttcacatttctcagcctcctatggccacggtttcctgtgctctgttcacgtttttcaaatgtgatgtttattatttcttaacttgtaatgtgtcaaacaagtataaggaaagctaacgagacggaaacatagggaaaaaatatttttaaagcagtattacaagaagaaagtgaatacttaagcggaattggtgaaaacctttaatttacagaaagtgtcacaaacccacttccacttcattagagtacatatattatatcaattcttaatagtagttataaattgtaataggaaccaggaagactacaacatttatcagttcacaagtggatttttcgtaatcctgctgtcttcaggtatacatttatgtcccaatttctttaagacacagagtcataaagagattcgggtgttccctgagctacaaagcagaagagcctccctcggcccctggggagcctgctcaggaatcgggctgtgtggggacagtctcctcacctttgggcatgaggtggggctgggcaaagaccacccagctccctaacccctactcatccacctcctgccccagttaaaatcaataaatatttactggcagctacaggtgtctggggaggcagaaaggaacaagtcatgggcccccacccaaggagggggcaggatgcagcgtaagaacctgcgcttggtcactgaggtgcttggcctcaggccaccacctcacctgcgcaattaggtacatggtaagagcatggtgacggttctctctccgctggggtgacatggggatgttaggtgacctcgagggccattgacacagtcagatgtgggagccccgggtccattgcaaatggatccagtctaatgggggagagagacctgccttcctcacacggtggtggccaacctcgacgttagatttgggggaagttcagaggagtgagcgggcctccctggggggcttcccagaggtgggcttagagccagactttgaagggcaggcagggttagagtaatgagcaaagggcagaggaagcagtgcgagcaaacgcggggacctgagcaggcccgttggggcagcaggagggcagcagggttctgggaagcaggggaagccgtcctgtcccggccggctgctgggagaaggtgggggcagaggggaaaatggagggaaactggtgcttccgtgtccactggtcaggggtgggagttgattagtaactgagggaggaaacataagatcctctctgagtggaaagtctctagcagtgactatctctgagtccttctccagtcccaaagctctgccatttctgcctttgctgctatgaaataaatatatatatatgtatatactgtttgtatgtgtttatgtgcatgtgtgtgtgtatgtgggggtgcatatatgtgtatatatgtgtatgtgagcatgtatgagcatacatatgtatgtgtgcgtgtatatgtgtgtataaatattatagattcagattttcccatatttccccacattctgccagcagtaatagaacaagctacataaattgccacaaactgtcaaatattcaggattctctgttctcagagttcaaagagaagtagttgtaacgatggttttcatattgaaatgagaactactaagctaagctaacctagagaggattctagcaaatagatcttggattgattccttgcttgcaatttatctaagcaatccataccaaaaaaaagtaataaatatgcaattttgcctaaatctcatgaataactgataaaaagctagattatctgggcttcagcaagtactttcacatggagttataaatacagaacattgaaggagtggtcgggaggccaggatcccaagtcagactgtgagaattcaatctctgggtgccttttcatctctagtctgattgatagactgtggagtgcgttctccaaaaacaagttttagaggagccacaaagtcggaaggggctgtgggggaagcaccttcggttgcctgcttgccacagctgctagtcagggaataggtacatcgggccgttcctcatcttcctggcctgctgacccacaattatcctcactcaaaagcactgtagatgggaccaggcacggcggctcacacctgtaatcccagcagtaatcccagcactttgagaggttgaggcaggcagatcacctgaggtcaggagttcaagaccagcctggccaacgtggtgaaaccccatctctaccaaaaatacaaaatttagccgggtgtggtgacatgtgcctgtggtcccagctactcaggaggctgaggcaggagaatcacttgagcccaggaggcggaggttgcagtgagccgagattgcgccattgcactccagccgggcgacagagcgagattccgtctcaaaaacaaacaaacaaacaaaaaaacccaccaaacattgtagaagaaggaaacaccctcactgtggatcacatgcatcacttctgaagatttattttgttaaggaaagaaactttgtttgcctcgggttttgggttggtgatgagttttcctcgttcagctcattagcccatagaacaactgcttcagcgcatcacgctggcagggccctgaaggagaagataatccgctctttctgaatccataggacaataatagcaaattctgagcttattaaaatacatggtgtcaccagctcatcagaaagggcaacaggcagtataccaatgcagttctggtcttgtagtttcaaaaggctaattacttttacaataaaataaagagaacttacctgtcattgagctgatgcatgtaaaagctgtttctagctaatagaggtttctgcaaatgattcagtacacattttccacaatgttccacaaatcatattggggtatagttgttggcggcatttcatacctgagtgaggtgtgatcatgttttaattaggatcctgtaaggtgaaaatagactgcacatgcaaatagtcggaactaattgcctattttcatgatacatagtgatttctaagaaaattatgactaattttaaatgaactaaaaatatgaagtgatatccaacctgaatcctgtgatagggtttgggagtttcttacctaaagggctaaatctttgtcatttcatttatagccattcatgaacacaggtaatagtgtttgcagatctttataaaaatgtgtgacatggattgttaacattagcttggcctcaaggtaattttcctctagaagtatttatatattttaatagacaactgacagactattggggcttcaagtcctttccttataaatttgaatccacctttatgttattactgcattcaattttctctagattatatgtgccaatacaaaaattctaaccttttccccttggtttaatatttttctgtgtgtttttatatgcatatgggaaacactgacagagatgaaacacccatcccatctgttatccttgtcctctttctcttctcctctacccccaccaatcacaagtgggaccctggaaacccggggctgtaatgcatgaaagatctagaaacgaggagaggtagaacacactaataagaagagcccatggtcagagcacccctgcagattgtcaggagctaagaatggaggaaaagagagactcattaagccatgccccatggagaggcaatgggaggtgcataagaaatgtttctggaagtcctgaccagggcaatcgggcatgagaaagaaagaaaaagagaggaagtcaaactatccctatttgcagacaatatgattctatacctacaaaaccccatagcctctgctcaagacctccttgatctgataagcaactttagcaaagtttcaggatataaaatcaatgtacaaaaaccactagctttcctgtacaccaacaacagccaagctgagagccaaatcaagaacacaatcccattcacaatagtcacagaaagaataaatacctagggtatagctaaccatggaggtgaaagatctctgcagtgagaattgcaaaagactgctcaaagaaatcagagatgacacaaacaaatggaaaaacatttcatgcttatggatagaagaatcaatattgttaaaatggccatactgcccaaagcaatttacagattcgatgctattccaattaatctaccaatgacattcttcatagaattagaaaaaacaattttaaaatttatgtggaaccaaaaagagactgaatagccaaggaaatcttaagcaaaaagaacaaagctggagggaacacattacccaacttcaaactatatgacaaggctacagtaaccaaaacagcatgtactggtataaaaacagacacataaaccaatggaacagaatagacagcccagaaataaggctgcacacctacaaccatctgatctttgacaaacttgacaaaagcaatagggaaaggactccctattcaataaatggtggtgggatagctggctagccatacgcagaagattcaaactggaccccttccttatactgtgcacaaaaatcaactcaagatggataaaatacttaaatgtaaaacctaaaactacaaaaaccctggaagataacctcagaaataccattctggacataggatctagcaaagatttcatgacaaagacaccaaaagatgttgcaacaaaaacaaaaatttacaaatgggacctaattaaactaaagagcttctgcacagcaaaggaaaccattgacagagtaaacagataacctacagaatgggaggaaatatttccaaactatgcatctgacaaaggcctaaaattcagaatctataaggaacttaaaggaatttacgggcaaaaaccaaacaaccccattcaaaagtgggcaaatgacatgaacagacatttttcaaaataagacacaaatgaccaacaagcatgtgaaaaaatgcttcacatcactgatcattacagaaatgcaaatcaaatccacaatgagataccatctcacaccactcagaatggctattgctaaaaagtaaaaaaataacagatgctgacaaggttgcagagaaaagagaatgctatacactgctggtgggggagtgtaaattagttcagccattgtggaaagcagtgtggtgattcctcaaagaacttaaaacagaattaccatttgacccagcaatctccttattgggtatatacctgaagtaatataaatcattttaccataaagacacgtgcacgtgtatattcatgacaacactcttcacaatagcaaagacatgaaatcaacctaaatgcccatcagtggtagactggataaaaaatgtagtacatacataccatggaatactatgcagccatgaaaaagaatgggatcatggcttttgcagcaacatggatagagcttttatcctaagcaagctaacacaggaacagaaaaacaaatcccacatgttctcacttataagtgggaataaacaagaacacatagacacaaagaggagaacaacaggcttcagggattacttgaggctggaggctgggagaagggagaggatcaaaaatctacttatcaggtactatgcttagtacctgggtgaaaaaataatctgtacaccaaacatctgagacacatgtacccctgagcccaaaataaaagttaaaaaatagaagaaaaggaaagtaaacccccaaaaaagaaatatttctcagactcttggagaagctgtcccctcacagggaatggggagaacagtctcttaagtttccccagagaagctttgtcacaagtaatctcaaatccagatctggttgaattctctgagagagaaagaaatgcaaaattaacactcaactcaggaaggttgattaagagaaggtgctaatatttgctttccttttcctcaattctgaaaatatcatacttcattttttttcttttaccgctgtttataagtatgttcactttgctatcaggtcagtttggttcgtgtgggacatttcgctaggattttatttcttttcttaataaatagtcaatatttgtcaacatatcacttttgacattctgttttttaaatacgctttgtagaaagtgagagatttctttaaatgaaatgatttcagtcgcagaacacacatttgtttttaatctctggtcccagtggtatttatctcttactaagaaagcaagctttccttttagaaagtgatctgttccctcattgttttatttataatttagagtatgggtagtctgtctgctgaaatgaaaataatgaccacagcctattaagtttctccaaatggaacaggtgatacccagggtttcaaaagtctgaaaataacaaatgatcaatgagcaaagaaatgaaggtataaggcctaaaatttgcaacataaaaataaacacatcctcaagaaatactgaaatcgatttttatttccttggctcacatttgtgctcattacacatcagacatttccatgatattcaactccctacggtttagatgtgagaatagcacatggaaacaaggacactcacacccagttgtgtttcccatccctgtttcctggctcatcactacatgatgagatgcttgagggagctgctcttcacacttaacgcccagcactcagcgtgtgcccagatagaatggaggcatggatggtagcctgctccattttaatattagattaaaatgcaagcatctcatttctttctacaaaattaaaatataagactgtcaggatccataagtgtctcttataatgaaagtggaagaattagaatccataatcttatttttgcaataaaaatatgaatcactgttcacaaatattcagcgcaatagaataccaagtgagattgtgcctgtcttagaaagaaaggcaagctctcaatctgtggataccatatggatgtcgctgagaaggagtggggacttgggcagcaaagctgccaggcgttggggagcatatggaagtggcctgtttggggccacagacggtcgggcaatgcttccttctctcttcacagttgtctaacatattgccactgtctacatgagcataacttaatagccaatttgaattctattgtagttaaacttggtgttatcctgttagtaaactagcttatattgcacaatcgagtccaaagattatttttgctttatttactacataaagcaaatactctgtaaagaactgaaaccacttttattcatagactatattggagattttcttttcttttcttttttctcttcttttcttgtcctaagacataacatagtaccttcaatgaagatgacggtggtagtgctagtatagtatacaaattagaaaaaggataattgcagagatcagaatctaagctacattttactttttttaaaaaaaaaagattgtcaggttatcatgttaaaattagcatcttctctatattaataaatcaattctgtgattaaaagtccagaaataaaataacaaataaatgtgcattttatttagctatttttagtgtgctattggatttgaagctaatttggctaagcacacgtttggatttccatcttttttggtatcacttcctaggattttagtgcagtggctcctaaaaagaatgctcaaatattacttataatcccccaagatatatcttctttgcatggaataaaatgtgaactaacttggagaaaggaacactttagacatacatttcattaatgtaaatatccacctcaaactatgtggattagcatctcttagaattgatgttacaatgctaacaagagaaaaagaaaacaaagtaccggtctacaaaaatatttgtctaatgccgaatgttagattattaaacagaaaagcacattagctaatgtgaaatgatgtttttctccaaatttattacattttccccctctgtgttaaattttctttaaaaggagatctcacaggagtggataggcaagctggatctgtgagcagctacaaatagaagcacaagacaaagtaatctataggctggcactcacattcatttactaaataaggtcgtgagcaatattaggcacatttttctgacacctttcccagttgactagaagttgagtgcatttagtaaaggaagtacacagtgaactgttgttagtatttatcaggaaacgtgatgagtggccctgaaatagagcatcttaccatccaaatttctcagtagccttaataaagaatagtcagtagccttagtgcagactagctggagtagatctaagcagtattaatgtggcagtccgcctcagcatgaaagtggagctttgcaaaaggacgagaaatggatttggatgggcaaggttgaaagtagttgtaagttgatctggcattttatatttcattaatcaatttctaaatctataattaaaagaaaactacattgagtggttgggcataaagtagagattgaatgatacccacaacaaataattgttaatattgacaggttatgctacagggattgcctaatttcacagatgagggtaacacaaaatgagacaactgctacataatgtttattctaaaggaatattatgacattactgagttttgaattttcctttgtattgactttttcataatgcatgaaataagcatacatcaacctagttaatacctgaacaagacaacatatccaagccataatttgatgtaaagcatgtgacacaaaggaaatatcatattgtaaatatcgtactgtaaactaacaactgaaaacttccatatgtctaaagtacacaaacatattctttattttaccttcacattctttcttttaaagaaagaaaagccattgcaactcagcagtgaacaaggcaaagacagtcaattgaaatcaaccctccattgcacagtaagagtatatgtgtgaagttcttgagccgagcccctaaaagtctccatgaacatcaaaccacgcctgttgggggacctcagttctctaccaaatgtcttgttaattgagctttggcaaatgtctccatgaggaccattgtcacccgtcatgctcatgagagtcacggcctacgcttccacatacttttaaaaatcttattaaagattacagagcagtcaggtgagtacacagacaattacatccagacgatgaacagaaggacagaataatgtactaactttctgctctttaatggactttacctgtgacccaaatatattccttctaaagcatttatagaactatcaaagtttagatattgtaataccaatgtgtaatccattctataatgcagaatatctttctaaaatgtgaaaaagtgccaagtattcaattcaacacagtaagtgttgaacatgaggacaaagaaaattcactggagggccttcattaaaaaatatccccactgaaaataaagcagagaccaccagagtggacagagcactcaccatggccttagaaggtggagcttccaagcggatgcacccatttctatgggctgaggaccataacctctgagcattaacttcctcttccaaagcacatggatgatatctactgcagaggcatgttgaagggattaaattggttaacgcatactgaagcagccactaaatttctctgttaaatacatgtatctcttccccttacttttgctgagaacaaaataatttctgttctttgttgcacccagtttgtactgaagggcataaccttgaatatttgaaaaggaaaactctcttcagttcaatggaagatataggacatgttaagtaagaaacagcaagctctttaaatcagtgaatagctgtattggggggaaaaatgtggttcatcccaaggcagccaaaagttgacctggtgaactgtctggttggttttatgccctatttaaacacacattaaacagatctgaagtgtcttaaaatggaaaaatgtcttcgttcaaataataagaacttaataaaattcttcattacttcactggagccttatttgacaatactaaattttttctcctaggcttacatgatagattctatcacagaatctttctctcccaccaccttttttttaaattccctttggctcttaactctaccattatgacagcaacacttaaagctgacctttttttgacagagttagcaattctcctccaggctatgtagtgattcttcaatgcttatgtgtaaattatgcaactgtctcatacttcacagaaacattttataatcctgtgtactattccatcattggtttaatgaaaacattaacacttggtttccataatatttaccatatggtaaagtcactgttttatagagtaaagggacagatagctgaggtcaatttaaataattgtcttaaaattccccatgatgaacaaattttttaaatttatcttatctaccaatagcatggaaatatcaagcttatatacacaggtggacttgcacctttaccgtatttgattatttttcataacttagaatctaggcatatatctatgtaatggagtttttacagaagcctttggacaagaacacatttgttgtaattctcggtatttaaatcaattgcgcataataaaatgactcatgaaaacattctacttaatatggtatatcttcccgtagtaaaagatgacttcctcgttcctccccctataagagttaccaatgtaagcagtcgaaatggttgagcctcttggttttgcactcctaccaagtctggtttgtaactaggaaaataagcaaacaggtcatgagggtatgaggggagggtagcataatgcagtgctcattctcttcctcttcctcaataattcagcccaaagccaccaaatggagctgagcacgtgcagtcagcgtctacctgcagtggcagagggagccactgtggtccagggaggggtgtcagggcctaagaagagtgaggaagacatctgtgtggttgggaagcactgccaatggccctgcaagtgggatcagaataccagagtgaccagaaaggcatctgcattgggatgaagaaggagtacagagcagtgggatattggttacatacaggggtagatcaaatgaataaatataaaaaggataatgggagccaagagagttacaaatatgaaaagatagagaatttgaaaatactctggggtattggattagagttgagatactggcataaactcatgattttcattatagataaaggtagctgtggaaatgagcatggttgtaactatgtgtatgtgtgtatagctatgttcactgtgagggcccgggagcagtggcaccccaaaagcagtgagcacatctggtacctggattttggtttctaagtaccattctccctaaaaaggaaccaaagctccttgagaaatggccaattccagaactaaggcaggaaaagtccaagaatgatcttggaacagagccatgtcaaaaagaaagaaaatgcttaaagagcaaaggagacatgtgcaggggacacagatgctggctcaaaagggttgcccaattgccaagtcagggaccctttgaccttcaaaataaatgatagtaaaatgggctataacccatagactacattaggaattaatgactccatattaatataaatgaataaatgaataaaagtttgatgaaaaattgtatatttaccattatttcatattatctcccaacaaaatgcacattaattataaagggaagaagagtaactttactttggaaactgataatcttttttttttttttgagacggagtctcgctcatcgcccaggctggattgcagtggcacgatctcggctcactgcaagctatgcctcccaggttcatgccattctcctgcctcagcctcccgagtagctggaactacaggcacccaccaccacgcccagctaattttttgtatttttattagacatggggtttcaccttgttagccaggatggtcttgatctcctgacctcgtgatccacccgccttggcctcccaaagtgctgggattacaggcatgagccaccatgcccaaccagaaactgacaatcttaattgaaggatcaaggttaacatggctatgaaatggacaaattaaaagcacgtggcagctgatggagcacagtgggatatatctgccagaaatgcaaaacctgactctaatcattaggaagtgtcagacaaaccccaattgagggatgttcaatttttaaaaaacaaaactgccctgtaaccttttaaaatgtccagggcatgaaagtcaaggaaaaaaaaaacaaaacaaaactgaagaactgttttagataggagaataaagagacatcacaaataatgcaacatgtgattctggattgatctttttgctattaaggatgttattgggacaactggcaatatgtgaatgagttggggataaagtggtagtaatataccggtgtttgttgcatttcagtgcttgtgttacgattatgtaggagaatgtccttgtttgtagggaatatacactgaactatttaggttctttttggtgataaatgaagtttagtatcttttcatgtgatcattgaccatttatactttttttatgaagcctctatgtatatcctttacccatttttctattgttttggttatttttttctcattgattggtattagttatttgtaaattaaggaaattaaccctttgtcagttataggtattacgaatacccccacttaaagtttacaaataaatccattgatcttttcctcaaggacagtaagggattttgcttaattctgtttttacattttaattatttgctctaactgaaatttacattggtttaaataatgagataaagatctagctgtacattttttaaaatgattagtcaattgccccaacaccatataaaaagtagcctctctttttcccacctttgaaacacaacctatatcacaatctaaattctactttattttgatctacttttggactcgattctgttcttaactatttcttctccagggccaaccaaactcttttcattaataacatgcttcggtagagtattgtccaatagaaccgtctacaatgatgaaaatattcactgtttactctgtccagtatagtagccaccatcacattgagcctggagatgtggctagtgtgactaaggacgtgaattttttattttataaatttctaattaatttaaacttaaatttcaaatagccacatgtggctagtggctaccatattggacagcagagttttattatcttactggggagtttctacccattctttccacagttttccaagatattctcacacgtttatttttccttctcataagaaatctagactttctggttttccagaaaaggtcacattgaatttacagaacactttgggtacagttgttatacttttaaagtatgacatcattaagccttcttttaagtctctcagtagagttttaaagttttctttatataaatttatacatcatcttttaaatccattcatatatatttaatctttttttaatttttattttgttttatttgtttgctgttgtaaatggtgtacttatttcaatgtcttttactatattttctcactgataattatttatatatagtgcagctatgtaggtatattttgtaatcttttgggtaattctctttatgttttcaggttgttgtaattcttctttccagtattcaaactttctagttatttctcatttaacactgttggctgccatttcaatggcagttttaagtagttgtagcaatggttaggatcctcgtcttattccacactttaataggtatgttttagcattttatcattaagcttcatgctggcttaaaaaagaaatctgtcaattcttgccttaccactgatttttaacatcagaaatgaaggttgacatttgttaacatgcctcttctcctaccttctatgtaagttatataatttacctcctctaatatattactagtatatattaatttgacccatttgtaatttttttttatctacccatgtattcaggaaataaatgccactcagtcacggcattttttttttgtgcaatgtactgctaaatttctttggtaattatgtaaagatttttgtaatattcaagataatcatctattttagaactattctatcatctttcagtgtcagtggtatgctgtcattatttaaaagaattttggaggattctttctataatagtttaaataagcttaaatagagaaatatcattccatggaaagtggaattaatttgcttctaacgccatcttggcatggcatatttttatgttaatttagcaatagctttaatagcatgcattgttatattgttctgttttctgtctcttctggagtcaatttagtagattccattctccttgactaggttgatcctgatatcattaatctaatgccaaatttagaaagaggatgttttagggaaatatgataattttatttctagttctgttgcatttaagatgctcatgggacatcgaggtagaaacagccaataaacaaatagaatatatatcttagagctatttatgagcaatctgggctggaaaggtagccacatgcatgactgtggtggttaatgagatcacccaaggacaacataaagcaatgacgagtaatggcccctggtggaaccctggaaaccccaacatttaactgggtaggaagaggaaaaggcttgagaatgacaggagagacagaaaagtcaagaataaaagatcaaaatctcccaatgcttcagaaaggacaaatagacaaatactgaagcatacccattggatttattgtttaggagatcaacagtggcctcagcaaaagcgatttccaggaagtgtttgagacaaagcctgcttttgggtggctgtaaagtgcactgaaggtcaggaaccgcagcagtaagtgtaggatgtgctcatcagaagcccggctgggaagagaaggatccatgagtcttaagtaattttagagatcatttttcaattgaacacatgaaatgtagacttttccctcttttctgtgtccagaggacgtgagaaagaaagtttttcctgtgttgtctaatagagagctggccgttgtaaagagcatctggggacagctgccttgtcatgcactttgagggatctgggacaccagggtgatgtggagatgtgaaaggagggccataaagcagtgtctgtccccagtggagccagcaccaagggcaagggctggaaaccgaggggcttgcacatcaccaaggaaaccaaggtggaggaacttagacaaaaacctggtggaggatgggcagaagacagtaatgaaaccatcgattcacaggctgctctcaagagaaaaggggaagaaaaacgaagaggaacacaaactgaaggcaggatttttaaggaaatatttacaaatgcttgaaaactataattaatgtaaagcaaggatagctgataaatagaatatctaaaatgcaaatgagagcttaatggcttagaaaaatcaagttgagtctgactacttcacccagccctcaataaacaccatccatctacccttcagcgcacccagcccccgtacacacatgcgtgtgcatacatatgcacatgtacacacaacgcagagatacaactttatcatagtgtgagatgctgtcgtatttggcaacattgctatattttcccccaatttgctgtccaatttattttaattatttatatttaggaaaccctcttccaagaacaaaaccacctattatttaaggttctgctgtctttaactagcactgcaactttacaatattcaatgtgcttgctttcaacttgcattgtctaattaaatcctccaataatccatataaaagcaatgatcgtttatacttgctgtatctacagaattacattctccatgaggaactttgaaatacccacaagcattccaccagcacgcctttgcaagtgaatcttcccaattttcattcaaaacttccgttgagtcctaataggactggggtctgggcacaagtgtgaaagactctgggatgggcagaaccaggcttggcgatagaggcttagcctgactaaatgaggcctgggaatgtaccgctccctgcagaagctaggggtgcagcccgattgttgtaggtatgatgcccaaaggctaaaacaagctcctggcaagcaccaaaggaaagctcagactcaggaaactcacccccaacgggagcccaatcccaacagagcaggtgataggcaggtctaggcatacgccagtccctggacaggaaggccagggttccaggggaggcccagtcacagatacaaagcccacgtccacgcagtctgctcaggaggggaggaggggcatccgctcacttgaaacctttgatcatgattctcaaataggcaacaatctttctacataccccgagggtaggggttcccggggtaggggtccccagcccccgggccatggactggcactggtctgtgctctgttaggaagcagctgcacagcaggaggtgagcagtgggcaggtgagcaaggcttcatttcatctctatttagggttgctctcattgctcgctttactgcctgagctccgcctcctgtcagatcagcagcagcattggattctcacaggagtgtgaactgtgttgtgaactgtgcatctcagggatccaggctgtgtgcaccttgtgagaatctaatgcctgatgatctgccactgtctcccatcaccccatcacagatgggaccatctagttgcaggaagacaagcttagggcccccactgattttacattatggtgaggtgtataattatttcattatatattacaatgtaatgattatagaaataaagtgcacaatcaatgtaatgcacttgaaccgtgaaaccctccccgacactggtccatggaaaaattgtgttgggtgagactggtccctgatgccaaaaaggctggggcccctgccctaggaaattcatatttgcactcttaggggtgttgtattcttcattctttgcgaataaattagcttcctcttctccaaaagaaaacagaaactatcacatgaagactagcacatcttcccactgaaaacttttatcaacttacctctctctgtcctcatatctcactttccctcctcgtatgatggatacagcaatctctgtgcagttatctaacacagatagatgctgaattctggctgtactgaattccatcctctgttatctacccaagaagttaatttctataattattccactttctactgcaattttcatgctagaaataaattcctttttgcccccacatccccttatgggtattgcctcttctctgcttctctcttcaacagaactccttccaagggctatgagtgctttccatggccacgtcctcaacactgaccccgtcccctctgcaacccactccagttatcttctgtctccttctctccattgaaatgcctcatgtcagggcccctggcagccttggtgttgccaaacccaaggtcctgttctttgtcctcctcttactcaaactcccagcaacactcaccccaaccatctgctctgataacagccttgtccacctgctcctccagctcctcccagctcacaggtcgctccctcatctcctgggctggctcctcctccctctgccgcaggggcagggctcgggctaccctcttctccagctgcactctctcaacatgtatatagcccagtggatctcaacaggggacagctttgccctgcaggggtcacttgacaatgtctgaagacacttttgtcacaaggtggggagatgccgcaggcattcgtgtctggaagccttggattcggccaaatatcctccaacgcacaggacagcccccactgcgcttactccgcatagaaggtccacagtgcctgttctgtccagcaaccctattctagtccatggttttaagccattttatacacagatgacagagtcacaggttgatatgcccagctctaaccacccctctaatttgtatgtccaaccgccgcctcactattcctatttgaatgtctaaataggtgatttagaattaacctctgacacagctcttcattttcctccaaagtccactctttcttggccatttccctctcagccaatgccaccagttatatagaccaaagccctaaaagtcaatctttattcttctctaatccttataagacacagcccatccagcagcaaagctcatgggctctgccctcacaacccaccttaaagctgagcatgtctcacagtatccagaatgtgtcttcccaagccttcactgtctctgggttgaacttctgcatttgtcttctagttcttctccttgcatctattcttaaagcctgaaaatctgctttctatgcaaaagagttatcttttcaaatacattaatcccatcatgccattctcttgcttaaatacctcccaatggtttctcattgagctgagagtaaaatcctcctccccactgcggcctgcagtcagcctgcctttcccacctgcctcctcctgcagctcagcctgcctttcccacctgcctcctcctgcagctcagcctgaatttcccacctgcctcctcctacagctcagcctgcctttcccacctgcctcctcctgctgcctccctccctcctaccagcatttccctaagcctcagaaacaccaaggacatttcctatttgcagcctttacagtttctgctcgctcagcccggagcatcctggccccggtctccatggggtgctcaccattgttgaggtctctgtccaaacatgcttccccaaagaggcctcccctggctgccctatggaaaggctgcacaccctcctcccatatcttaccttgctttattttgcttcacaaaacacactgctatttgaaaccaagtcatcatctactatttaatatcaatgcattagctctctttctccctagcatgtgagccccagtccaagcaaggatgccgtcttttcaccaccacctgcccagaatccagaacagagctgcacataaaaggagctcccaatacatgcagagtgacttctgtgtcttctgcgacagatagagtcaggacagagggcgggggtgggggagtgcaggaaggaaagggtgtgctccatctttttagtaattatgctcatgctcacaaagcctcgtctgtgagtttttccatacattgtctaatttatccaggggtgtgctcccagtactcaggcctcttggcagggcattctgagacaagggacagaaggactgactgctaagcgggggcaagtggggctgagatgtagatttgcacacgccctctctctctccatagtagacctgagaacaagggtacgaggcaggagtgagagccaggctctaaggcggagaagatggcacagaaaagacagcgtttgggaaaactcacagaatgccatagagtttccataatatatgataaattaaattaggtaagaaaattgcagtccagtacttaaagtcaaagaccactttttgaaacttccagatgtgtgtgatttggagataaatatttgcatatctttcctttaattatgtttttttaagagagtatgtggagaagttaaatactcatgattgcacgtaaatgttaccaaaagtatatggaatgtctaatcatcattaataatggctaaactgtattgcatatttaccaagtaccaggaaccatcctaagagcttacctggatttctttgttaaatcctcacaacatccctatgaggtaagattcattattgtccctgtcatttgggaaaggaagacctaagcttactgatgttatgcaacttgggctctgcatcactttgctgtcttgttccagcaatttcacatgagaggcaagacacagtgagaataaatcatatagttcaggagtaaaacaagctttagtgtctgcagattactattttaaaaatcctaatggaaatcaagcattttgaagacaaaatacataagaaaatactgtagtggtctgtctcagtcatctagaaagcatttcattatcttggaagtaaatggcacatgataaaataaatactctatttccccacatctggctcagcatcgcagttttcctagttatttgttcctgtattcccaaataaaacagagtccagagataggaatcttcaggaagccactgggtccttagagtctgaatctgggtgttgcgggaaggttgatgccacttctcttccgtgcgggcaaaggcagtgagaagaaggagccaagctccctgcaaactttgtacacgtgcctttgtgccttgcctacacctcactgtgactctgtgaaatagacattactctttgattaatttcaccgtgtgcagctgaaccagtgactctcagggaggtactttcatggttgcaaagcacatcttacgttgaagctggaatcctaggcttccgcctgattatcagaaaggagggtatttgcagccaagggaactatttgaaaataaccacaactttaaataaacaagcaagaaaacataggtaaatgaataatattccaaagaatgccaaagatgtgttgtgtccctgcaagtgtgctgaactgtactgaactgaccaaagcactgcagttcagtgggcttgctgaggacccaaagctcaatgtcattcgctcactgttgacagcaaggcctttgcctattaaaggacttccctgccaggcacaggtgtgtattggagagaagagctgaggatactgggtcgtgggaccttgcacagccagactgttaagggctagaagaatattttctaatccgcagctctgggatctataaaatctgctagaaggtatgagaatacagacaggctgcaccctgatcacctggcgatattcaggtgcagtgcaggagacactgaattcagcagcagctgatggaacatttttcctaaataaatcaagttgttcaggtgcgctgaccaaatgacaaaaaactgtaaagtattttgtaaacttttattatagattacagtggtaattgaaaagtcaagaaaattaacccactataaaaaagatatttgagcatgtaactatatttacaagaagcaggttggaattctcagggacagcttgtggaaatgaaggtcccccatggtccatcgcaaccaaccgtgttcctggcgatgctgtgagggtgcatgagatgggagcttgcatccaaagaaggatgtgtgaggccgaggcgggtggatcccccgaggtcaggcgttcgaaaccagcctggccaacatggtgaaaccccatctctactaaaaatacaaaaattagccaggtgtggtggcaggtgcctgtcgtcccagctacttgggagcctgaggcaggagaatcgcttgaacctggaaggcggaggttgcggtgagctgagatcgcaccactgtactgcagcctgggtgagagtgagaccttgtctcacttaaaaatatatatatgtgaacaaaagcattgcacggaaaacacttttaaacacgttcacaaataacaaggatggagtggaattaatggccatcctaaaagagctgaagcatttgcccaatctgcccaagaaagaaaaattaagagatttgaaccactaagaaataatgtagattctgcagaacccaatattgacatcagataaataaacagttataagtattaacatatataaattactgggtccaaactgcctccatcccaagtaattaagagaattgactacaacatttcaaatgttacttttgaaaaatcatgtagagttgtagtaatatcagaatgccgtagagaaagttaatgattatgtagctcaaaaaggaaaagtaaatgagactgtaatattgtgattatttaacttagtgtacagattgatcttgccttaaataattaccaattaacttctactgaaaaatgtagtaggtatgattgtgtataacatacctagggaaaaagaagtaaaacaaaagaacattgaccgggcgcgatggctcgtgcctgtaataccagtactttggggggccgaggcgggtgaatcacctgaggtcaggagttcaagaccagcttggccaatgtggtgaaaccctgtctctactaaaaatacaaaaattagccgagcatggtggcaggtgcctgtaatcccagctacttgggaggctgaggcaggagaatcccttgaacgtgggaggcagaggttgcagtaagccgagattgcgccgttgcactccagcctgggcaaaaagagtgaaactccatctcaaaaatgaaaaataaaaaataaaagaatattaaggataaactaaaatactgagaataaaaatgtgtgtgtcccattgagaaaacattttctgagtgcccactgagctccacacacaatgggaaagcagaagaaggatggaagtagtagaagcttgcattctaatgagagtgttagacgactcgactgtaatgcacaggaaaaagtaaatgctataaaagaagaagcctaaatcaagggttacaggaggatttaattttggaagagggaacaggaaagagaaagtggtcagaaaaggcttgaggtagactgctttttgctggctttagcatgtggtgggctttcgactggctgaggaccagaagaaacatgcttagggagagggagctggtccacaaacaggcagaatggcatgcattatgaagatgtgccttgctaattgaattgcttttctaaacagtggatgaaaaataaagtagaaacagagtgattctgttagtcaggttccctggaaatgggctctgagttggagattcttgcacagaaataacgcctataagagactgagaatgctatccttatcaaaattccagtggcatttttcacagaaataggaaaactatcctaacatgtatatggaaccacaaacaccctgaatagccaaagcaacgttgagcaaaaagaacaaagctgggaccaggcgtggtggctcatgcctgtaatcctagcactttaggaggccaaggtgggaagatcacctgaggtcaggagttcaagaccagcctggccaatatggcacaaccccatctctactaaaaatacaaaaattagccaggcacagtgacaggcacctgtaatcccagctactcaggaggctaaggcaggagaataacttgaacctgggatatggagcttgtggtgagccaagatcatgccactgcactgtagcctgggcaacagagtgagactccatctcaaaaaaaaaaaaaaaaaaaaaaaaaagaacaaagctggagtcaccacactgcctgatttccaaatacactacaaagatataataatcaaaacagcatggtgctggcataaaaacagacatgtagaccaaatagaacagaatagagaggccaaaaataaatccacacatttatattcagctgatctgcaacaaagctgccaagaacataacacagggaagggacagtctcttcaataaatggtattgagaaaactggatatccacatgcagaaaaatgaaactgggccttatctcacaacatacaaaagtcaactcagaatggattgaagatttaaatataagagttggaactgtaaaactgctagaagaaaacataggggaaaactacgtgacattggcctaggtagttttgttgttgttgttgttgtttttgatataacccaaaaggcacaggcaacaaaagcaaaactagataaatgggattatatcaaactaaaaagcttctgtacagcaaaggaaataatcaatagagtgaagagataacctacggaatggaagaaaatatttgcaaaccaaaaatcctatgagttaatatacaaaatatataaggaactcaaacaatttgatagcaagaaaacaaataacccaatttaaaaatgggcaaaggatctgaatagacatttctcaaaagaagacatacagatggcaaacaggtacatgaaaaaatggtcagcatcagtaatcatcaaggagatgcaaattaaaaccatgatgagatatctcttcacacctattagaatggctaatatcaaaatgacaaaagatagcaagtgatgtggtttggctgtgtccccacccaaatctcatcttgaattttaatctccataatccccacatgtctagggagagacctggtgggaggtgattggatcacaggggtggttaccctcatgcagttctcatgatagtgagtgagttctcacgagatctgatggctttataaggggctcttcctccttagctcctcactccctctctctcacctgccaccatgtaaggtgtatctcttccacttctgccatgactgtaagtttcctgaggcctccccagccatgcagaactgtgagtactttatacattacccagtctcaggtagtatctttatagcagtgtgagaatgaactaatatagcaagtgtttgtaaggatgtggaaaaagaggacccttacgcactgttagtgggagtgtaaattagtacagccattatggaaaacagtatggaggttcctcaaaacgttaaaaatagagatactgtgtaatccagcaatcccacttctgggtatatagatgcaaaggaaattaaatcagtatgttgaagagatactgcactttcattttcattgcagcattattcacagtagccaagacatggaatcaacctaagtgtccatcagtcgacgaatggataaagaaaatgtggtacatatacacaatggaatactattcagcctttaaaaagaaggaaattggctgtgcacagtggctcatgcctgtaatcctagcactttgagaggctgaggcaggaggatcacttgagtgcaggagtttcagaccagcctgggcaacacagcaagaccctgtctctaccaaaaaaacaaaataaaaagaaggaaatcctctcattttcgacaacatgaataaacctggaggacattatgctaagtgaaatataccagtcacataaagacaaaaactgcgtgatctcactcatatgtggaatctaaagtcaaattcatagaagcagagagtagaacggtgtttagcaggagcctggggaaggaaagcggattgggagatgttggttaaaaggcacaaagttttgatgagacaggatgaatgagttctggagatccactgcagtctggtgacgctggttaataataatgtatatttgaaaattgctaagggagtaggtcttaaatgttctcaccacaaaaacatgagaagcatgtgaggtgatggatatgctaataagcttgatgtaatcatcccacagggtatggcgtacatgtgttgaaacatcacattgcggactgtaaatgtatatagtttttatttgtcagttaggccttaataacgctggaggtgggaagaaagaggaagaaacggctgggcaggagaggttagactgcctggaggaggtcccaggcaatctccacttgaggccaaggggctggggctctgtgcctatacattagccagcccatgcaggctgctggaggaaggggtaaccttgagtgaagcagctcctgtctgaggcagagggcaattcccagggtgagacccagccatcggtggctcacatcccagtgcctggggagaacctgttctctaggagggttggggcagtactcagcagcagcctccaccgtgacccatgatgtagtaaaggataaactccaaaaatgtttgaaagtgtttgcatcattgatgtctattttaattaaaagagccaatgggattaaaaatcatggtaaactgatcctttgtagttcataagtgtgatgagtaggatttcacactcatgtgtgagatatgcctccctcaaaccttataaatgatgatggtacgttaaaaaaaataatggtaaaccacataagattccacgggaatttttgtggcatgtaaaaacatgacttcctgcttgtattaggccattcttgcattgctataaggaaatacctgaggctgggtaatttttaagagatttaattgactcccagttctgcaggctgtacaggaagcattgtgctgccatctgcttcccaggaggcctcgggaagcttctactcacgatagagggcgaagtaggagcacgcacatcacaagatgaaagcaggaacaagagggaggtgggaggtaaggtgccacgtacttaacaaccagacctcaccagtactcactcactagggcagggatggcacccagccatgaggcatccaccccatgaccaaagcacacctcccaccaggcctcgcctccaacactggggattccatttcaacacaacatttgagcgcgatcagatattcaaactatagcactgctgttctaatgagttagaagttgaagatgcaccaatatatgtaacggaaagataacgagaggactgtaagccattcccatgggtgtgccgtccttcatgaaggagcagagccagcagcctacccatcgttacaggacttgcactgagccaggtcagcaggagcagaaacagctttatactgatggggactacaaagctttaacacccaggtccagcaaacattcacccttacacccagaccctcatacacgtttgcaagactggacaagataggtctgcctgttccattgagacgaactgccctccctgtggcgagaatgaaacccacaacttgggtgttattagcacagcctctcatcaaattgacaccaccagccataggttatgataataagaaaataaggcaaatgcagctaagctgatatgtccaagtcgaaaaaactaatttcagcttagaaaaacagcacactaatgaagcttttaaaaattaacttgtgattaaagatcatacagacaggcagtgttggtgaaaaaccacaatgaacatcaaaacaagcatgagttcagagtctggaaatgtatccagaaggttattgtttttaaatatacagagaagacacatatatttgtttcctgtttaagatatatatgtatattagaaaacaagaaaattatttttttttcaatctaccactaatcagtgtgacaaaaatccatgaccctccaggaatttgaccagctctccaggcaatggattcttcaaatgagagcaagttgaagtacttgtggtatcagaagatgtagtcagagtccctgagcccagagggtgttcttaatctacgcctgaaaatgattgaaatggacatcagtggaggcagataagctttggaaatctttaagcaggcaaaaaaaaaaaaaaaaaaaaaaaaaaatggaataagtaaacctagaagagtacctggcacacagcggaggctcaacatgtgctggattaattcattaattcattcaaaattatgctggcggtcagtttatgacaaatagattaagatagtgcacgggtgcacggccattagagtatgattagtaaaccaactttataccaaagaattcctttttatggaaaaagtacagtcacttttttaaaactttcggcaatactgcagaagtaaaggaacgatggtgaacgatcatgattatttttgtaacatttcccaaagtaaaaatttcagctgaaaataaaaagaaacctttataaattggaataaatgcagactggagtgattctctagcacagtgaccaacatttggacacatcacataagtcttaaaggtcgcagaatgagtctagttatatatgtttttccattccagacagcttgaaatttactgtctaattcaaaagtccaaaactataaaactcctgaaaataatctttccaaatgaccagtttactttctccctggacctgaaaataggatggaagggaagtctaattctgagaaagtagaatctccttctgatgttttgtttataaaaatagtaaacattttactgaaccagaaagggctaaatttcatatctcaatttaaaagtatttgcaggccaggcatagtggctcatacctgtagtcccaatgctctgggaggctgaggcaagaggatcacttgagtccaggagttcaagaccagcctagtcaacatagtgagacccccgtctctacagaaaagtaaccaggggagaggtggtgcacacctatggcactcagggggctggggcaggaggatcactttgagcccaggagttagaggctgcagtgagcaataatcgtgccacagcactccagcctgggtgacagagtgagacctctgccttctgcctctaaaaaagacaaaaccaccaccaccaccacaacaaaaaatccagtatttgtgatccctttcaaagcactgattcttctgcttctcagagcactcagattgcatctgatctttgcttgccagaatcatcattttatggtttagcaaggagttgtctgcaggctttgctccagtaatggttccaaagacattcagccacagcttgaataacctgcacctgagcacaaatgtggcattcgtagtcaagcaccatcgttccccttcagttagttagtctcgtgacttttttaagtagtaattccacacctgtcaaatgctgttggaagagacccttgaatagttctaggagaaccctcctctgggaagaaatttgggacagaagaatttttcttaagaaggaagaaaagatggatgaggaaagcgctgacttcctctcatgaggaccaacaggctccacaattcctttagcggcagttgtcagcaagatgcccagaactgtctccaggcgacagcagaggtcaatttcaggtccacagagtcccactaacctcctataatttagaacctaattcaattgtaacctgatggtgaaattattcaacagtttgcttctgggcattgaaataaataataaaaaacagcaaatttaatactgccattgttgacattctctacagtggcatcagaaacgcctcaaagtcctatttacttccaagtggccatcttcatagtacattgtcctttgtgaaagctctttgcaaagagaatgtacgtctatatatgtaacatttgcaccatgcattacagtttttaaagagcttagcaaatatgaatcttctttactacacagcactcctttaagataaagcattcaataaccaatttttaatctcttcattgtagcacaggtaactgtgtccttatgttaggaaattatgccccttagaataccagttattccaatttatcagcctaaaatgtatatggagtacttactgtaagtctacatgcatagaattttttagtgtaataaaatattcactatttaatggacaaaacatccgaaagagatcctactttctcagaattagacttccctttcctcctcctattttaagttccagggagaaaataaactagttatctggaaagcttatacttagtggagttttatagtttcgacttttgaatagacattaaatttcatgccatctagaatggaaaaacatatataactagactcattccacggcctttaagacttatttgacgtgtccaaatgtgtccaactatgtgtctatatgtctgtttattgctgatggaaacagcaacagtaattcaccttcaaaatccctaaaacgtggttgaataaacaaatgaagaacgcaggatggtgtgtaatgccgaactgctgtaggtgcagagttagggagggaaaaacccggaaggttatcagagcctccaacattcagaaaagacttcctggaggagagaggccttcaattaggcctcgaaggacagtatttggagagagaggaggaggtaggtaaggtgtccctgccagtaattacagcctcgtgaaagaagcctgcgggacagaaatgaatatggtattgagatggcagaggagagaggtcaagggtgccacaatcttcaggcacaactaagaagatccctgcaaaggcaacggctcctctgggccagcagagaaagtggagaccccaaacaggggctctcaagataggatggggctgcggctgggagcggcaccacctttgggaggctggcaaggtgggcaggcccacgggggagccgtggcttgctggctggggtttctcctgccagcagcactggcgtcctccaaaattgcttcctgcggcttttctatttctcttaacttcatccactgtcttttcttatgtcctgtgacccactcactgccatgccactgaaaatgctgttagaacaagaaaacagtagtctgtgtcatgttaatcacatcctgctcgaacatggccagagttccctgcccataccctttataaagcagtggacagtccccagatgggcttgctggaagtctgcaccggcgctgcatgcaggagagccccgggctgctctgaccacagtgacatgccgggttgtcacaccctgcacggatgcagacaattccatacagatggatcagcaactttgcaggtcttcacaactatgagcccagatccgctgagccaggatgcctcagcaaaaggtgacttcacatagggtggcttgaaaaggcaagcaatcctggctgactgcatgccttccccaggaccagcacccaccaggtgactccttttaccctcaacaaactccatctgccagtcagagccccttatccatgagcttgcatagtttcagaatcactctcaacaagcagagatccatttgcctctctgaggtgggaccatacaggtgcaagagcctctccagaccactggctgcaggttggccatgataaacagcctcacccaagaatgctgagcacgcagttactgtaggtaaacaagtcccggcttcactctcagctggagctggcactacgttggtatttatgtaatgctgcattggcagatatttcatctgcagtatatgttgaaatggacagataattatttagaacaaataaaataagctacttctgaagatgacttgaagtgggcactgacttgctgggactctcaggccagcctctaccacccaaggcagctctctacagaacacaaaggtccagcctagaagggagtggctgaggtgagtgcctcaggacaagccaacacagtgatgttcattccaggaatatttatgatgaagagaacccaggagagctgaagattagcgtcacactcttataatagagaagagttcacctgcaccaggtgccgtgtcccgctggggcctggctactccagaggctcctccgctgctgcaatgtgcccgagccccaacctgcaagtcctcctggtagagtagctcttagctccagcctgcgtgtcagaccaacgcccacactttgtccacttcttactttgtttagtaagaagggaagggaaaaggaagaaaaagaggaaaggaggaacaaaggaagaggagaaggaagaaggcagtgcagtaagggaagggaaaggtgggaaggtgtggaaataagaagcagagatgagaaggggcagaggaaggtggctctgtggtcctggccttgttcatggcaaaacacacttatactttgagggtgttccgcttccctaaggcacaccggggaaggtcaacaggttcctgtggaccagcgagaagaggagccctgttcaggaacagcaggcaataggaagagacaaaagtgattgattccctgaggtgccagagcaggaagaacagtccaggcatggcctgagagcagagcaaggtaaagagcacgcctcacctaccccccagctcacgctcccaggaggaggccctggccctgcacagccagcccctccacccctcctccaggagcctccacccccgaaaccagccctcagccctctcccaactctgctcctccagctgaaatactgcccctcacaccagggccgcatccctctgggactacagctggagtggccctgccagtgtagcaaagggcatctctggggaggagatggtctcagcaacttcaaacacattttctgttaagttttctcttgtattgtgatgttacagaacacgctcagcaggaatttgtcccccaagaagtattctttgctgcaatccatcttcaattcacaatgggaataacctgctcactatcctttgtatttttctcacctactttcatgttttctacatctctgttaggagatttaaattatttagggacaaagctgaaggtgtgtgaatggatggatgaagagatggctgaactgattgatgaacaaaaagttcacctgccagtaaaaacagaggaatggagtagaatgcaggaggccggaggctgcaggggcattttacagttgacctagatggtaatttggagagagagggagagaaatgacaccagccttgaacttgagagatgccattttctaaattaccctgtgtggctaaatgacttttgcatgctagcccaaagaaataactgccatgcatttcactgtgtgagaaaacatattatgagttcaagaaaataagaggaaacattttaacatcaagatgggaagggataaagacagtccaagaggccgtggagggggcaggatacagctgtccacatgagaaatggcagtgacttctttgtgttaggggcagaggagatggagaaaatggaaatatttgaaaaatattgaagacatataaaggacaggtcttaataacacagaattgtgagtgaggaagtaggatgagtaaaagataacttctggatttctgttctgaaaacaaaattctggaaggggaaatggaatgaggagcacgtttgtagggaaggagggaaattgtaagttgcactgtccttcattgttaagatttcaccaaatgagagacattcaaatagaaatattccctaaataataagacattttgtcttggggctcaataagaaatgcctggtgggaagtaatagattttattcagccatttaagagtgttcaggtcttgggggataactatcatcattaaaggaagagtactcttgtcattaatgatggagatggtccatagaaagtgacacagagcagggacagaagatgatctagggtgcagttctgagtctcaccctctgctatagtttgggtatggtttggatatagcttgtttggcgctgccaagtctcatgttgaaatttgatctgcaatgtttgaagtgaggcctggtgggagggtcatggggggtgcagatccctcaggaatggcttggtgccattctcaggggagtgacttctcatgggagtgggtgagttctcactcttagttcctgcagaaactggttgttgaaaagaacctggcagctcctcctctcttgcttcctctctggccatgtgatctctgcacacaccagctccccttcgtcttccacaataaatggaagcttcctgaagccctcaccagaagcagatgctggtgccatgtttcttgtatggcctgcagagccatgagccaagataaacctcttttccttaaaaattatccagcctcggcattcctttatagcagccccaacagactaaaacacctacatttaagggacagacggctcccaaaggagaccaagcagatgtagccacagatgcaggtcaaaaaccacaggagtttacttctatgggcaccaaaagaagaatgtgtttaaacaaagagagcagagtcaaaaatttctcttggaggcaaagtaaaataaaggctgaaaaatgtccattgaactgagcaacaatgctgtcttgggtaaagcagttttcatatagaggtaaaacagaagccagattataatgggtaaaaaaataaatgagagttgaggaagagagcaagtacaggcaactctttttaaaaagttgattttgacgaaggaaagtggggccaaatgttggtaacgttttgggttagacagagacttgctagttttaagacgaaaagacacgactatgtttaaatgaagaaagatatgagctccatgaaactgaaggtacaaaaaagaaaggctataatctattgtacaagggccctgaggaggtgggaagacatagcggaagaatttgcctgaaatgagaaggggctcacctcttccatcgtaagccggctgaatgggagttgtgggcatgactcgagcagttcagacgcaccacatttcctgctgctctctaatatccccaaacctgtcatatttccccttttgcatgtgacagtctaatgataatcctgaagcatatacagatatatttcttctccattgataaagcatcatataatcttctggagacacaggctccattaaaataatttctcaatttccccattgtacgtaactgccttccatgaagcttgccactaaaatgtcacttgactgagaggaggtggtgttggtgactagaaaatgtatgtcttgagagcatggtgttcttttacttgtggaatatgaaatatctgcttccaaattcctcaaggtccttctccttggagaaggggttttcctcttgccagatcatgccattcatcccctgtgttaatgtctatagactagcaaggaaatgtgcctaaattcaacagcttgccagcacctaagagaaattatcagaaatattgtccacttcctcttatacatttctctctggaaaattttttcaatttcacaaggttttatcatctatattatagggatttgtttttaattcttcacaatttccttacactcctccaaaggaatctttaacaagtacagttctctttttcaattctgcccttggtgagtcaatttatagtgtggtttgatattttattattgtcaaatattgcttataagagagaggctttggtttggtaacaactaaacactaaaaaagaaaggaaaaaagttgttttttttgtttgtttttgtttttttaaagagaggctttgggaaaactggcaaactttctgctcttccaaaggttacttgttatatgactgatctccaagcatttatttatctgaaaaaatctgtttgtgattctgcctatgtcagggcagcaatggctacaagatactttgaaagatggtgggatatgccacacagggtatggcataccctgtatgaacctcagggtaaatcatgttaaatagaactgttctcctcccatctgccaaagcacatttatttttcttcaaaccaaaatgtagtttgacctccaggtaggtttcctaaacaaccctgcccttctccattcctcctagtgccaccttgagctggccttcttctgaatactctttcatttattggtaattgtgactcacttatgtatacttatgctttgctagcttctttccccctttggaaattaatctcagcagaaactgagttgaatctcttctacgtattcctaagcatagctgtcctttgagcactccataaatatttgtctactgactggttgaagatttagtctcacacaagtgcagatgaacttcatctcattttagaactctgatgggaaatatgactgtgttacacaagattccgggtcttttcctaccctcgggtgaataaagagccataatcaattacaaatgtctgctatgggactgaaaagatggcaagaagaggtggagactgtgccgctgtaccaagagtttgccacttcgttttagtggggcattgaatggttgattgtattagtccgttttcacactgctataaagaactacctgagactgggtaatttataaagaaaaaaggtttaattgactcatagttctgcaggctgtacaggaggcatggctggggaggcctcaggaaacttacaatcatggcaaaagctgaaggagaagccagctcatcttacatggcttgagcaggagggagagagcaaagggggaagtgctacacacttttacaacaaccagacctcatgagaactcactatcatgagaacagcaaggggaaagttccgcccccatgatccaatcaccttccactaggcccctttcccaacattggggattacaattcaacacgagatttgactggggacacagagccaaactatatcattgatggtttgatacaggcttttgagatacgtaatgtgtagatatttcctttaattacttagcatgatgaatttcatcaaacctaaatatatatcagtggtttgattggctagttggtgggtggggtttttttggcagggggtgggtttaccctccatttctttagtctgacagtataacttttggtcacgtgattgttccataaaatatattgggattgcatacatcctaatttgcagtaattttattttcttgatagacacagtcttctgtaaatggatttttatcttagcaagtattttttatatacatattttctaccaacatagctaatttgactagatgttattaaatagggagaaaatctagctctagttcatgttttctcttgcttaaggaaaacaaaaatgctcaacttttgttgaaaatgaatgtaaggccaacggtaacattattcaaaatataataatgtcctttttaagataaagtaaattggagttgtctctttgtcaccccagttactgtctctaaggccacatttctgttctcataagataggttatatgaaaagaaattgaagcaccataaattacattagtgtaaggtcacaaattaatcactttataacctattttctcttgaaaactctttctttatagaagttctaccagaaaatggctcacactattgaacttaataggttattactacatgttttgctcagtattctaagccaagtcatcaggaaaagattatagttaccagttcccattgtcctgtttgacatcaatgaaaagatgctttacttatattttcatgtgttatttatcctgtcagaagatatatccattttatatgcagctaaagttcctggggcttttcattaatcaactaaacacaggatgtgcttgaaggaagagctgtggaagggagtattgccccactgtggaagggagtgttgccaaacccttttagtaaaactgaaattatattttcttggttaactgaaaaagaaaatgttaatgatggtgtggactagcatcagaattaattttactctacaattgaatttatggtcaaagtgtcatattcctattatttaagaatgttttgtattatatcttaaataaaatttattagctgaataaatatttatatgcatgatataatggaataaaagagggagcaatggagactttatttcaataagtgagttttatatacaacagtaaataattaaatccaattgattccagaactcataaggcacttcttttataaggataagtgcagtattggtgttagattgagtctataacttataacagtatcatacttgggaggaagaatttgaatagaagggcagaacagaatttgaatctagttcaaatgagagaaaatctttgtaaagtgctggcataatgaaggaagaagtgatttgacattggcatagattctctctgctgtcaaagatctgaagaagtcgtttcatcccactgccccacatggggcattttagccagttgactgctggtggtctcagacaaagaaggaacacgttcaacaccaccatcaaggactttcgtagtcttgattcttagactttgaataactcttctttgagttctattaacattcatctttatttttctcagtattgtagaatagaatgtttagacttcccagaatatttttttctcatgtaaaaggctcaaaaaaatggtgtctcttctgtatttctatcagtcactctttcttctttgtccttcatacttgagttaatccatctcatgcttcaacctcacttttggcgtgtaatcacccatgttgttttgctatctctgatgatggaagtgagtttggtggaagcaaagatggcatttgtctgtgtctatatccccaactactgacctagtggtcagcacttagcatgtggtaaaagcttgtgaaagaagcgtttcaaagtttagttccaaatcccatcacctcgataaattactgaacaaggcacttattctttttgaatatttttctcatttataaaatgaggctaatgatatcttctctctgggttttcatgacaagcaaaataatgattgagagatttgtaccatgtaagatatgattatttttctaaccttcaactggaggaaattctgtcaacacacggttttaagtttccaagtagtatatttctgtgcattctgttggcattcaatacttactgcccactgaaatgagtcttcttcttttatcataatattcttaagatgcttgcctggcgtcttggtttcaaggaccacctctataagagactccacaatctacacttcaacacttgatcatttacctctgcccagaatcatgtctgtaagaattagctccatcagaatttcgtccaggagtccctaggtggacaccttgctgcttctccctgctacaactcaatctctccaagtgcaacccctgtccttcttaacatcacctgatggtgtgggcacagctggctgttcattgcccctcctgctcccacggctgccccaacccctacacacacccacaccccccacccctacacacacacgcacactcccacatacacacacacgcacactcccacatacacacacactcacactcccacatgcacacacactcacacctccacccccacacacacacacactcacacattcacactcccactcccacccctacttctacacacactcacatacacacacactctcacactcccaccccgacatacacacactctgacacacactcacactgtcacacgctcatacttccatccataacacactcacactcccaccccccccacacactcacactcccatcgtcacatacacatacacacacactcacacccccatgcccacatacacatacacacaccctcacccctacttctacagacacatacacacacactcacacctccacccccccacacacactcacacacacaactgacgctggctcgcgcacatgctattcccagagctctgcttccgagacggtggtggctccccggggccgcacctgtgcctccgccgggcctgtggggtgagtgggatgctaacgcctggccttggagagagatgtctgggaggaggagggggggacgtgcaagggacgattggggggtgcattaagaaagaaacccatggaatatgaaagctgtgacggggacagaaaatttaagaaaaagcagaaattttgtttaaagatttagggaaagtgtggctgtttaagagacaagctctgtactcccgtcctcgtgaagacttccataaaatctatactatttaaagctgcttttggtgttgagtgttggagtctgtgagtacagggtgaggtcacggggtccaatggtcgccttgcctgacgccctgtggggtgactcccacctccttggtcccctcctcctcaaccacctggctgggagagggctcgtaccctcctgctttgggctgcgttctcactttcacccagacctcacgctcctaaacacctccttggatttgggcacatacgcggtggggcctcttcagctgtagagtcattaaccctaaactccttgttcatggaatcaacagccgactgtgccgtcctcaccctcggggcgctgccctgtggagggaacgtggtccattccggagcgcagctctgcccatgtttgcccggtgacctcgaccagtatcccccctcaagtaaacgagggctgcatcaggcttccctcctcgcccgtagcaaggggcttgcccttttgcttctgcaccataaaagcactcatgttccagaaagacttctcataacatctgcttgaaattttactccccaaaatcggacttttcttactaatttctaattcttctcaaaaggcaactcaagtctatgtgacatatttatctgccaatctttctccaattcttaatgtaaattatacagaaaattggtatttgatatttttcggcatgtttcctagtgaaagataagattttatataccatgtaaatttcattacctgagagaggggaagaaaaaaggtgaaaggtactgctgaacctgtacactgcaacagtttaatttaaatttatgatatgctgtcattggggaaaaaatcagtaaaatatctgaatgttcacttaacatattttcaacaaaatctcatttttttctcctcaagtctttatttgatttacacaccaagaaaagcagaaaggatggcaggttcaattacaaagctaagtcttgaactttatgttcatttcgcttttaacaggtgtgtgtatgtaatacgcagcccttccgtgatcatctgacctggccctcttgggagatgtggcccaggctccaggagccctcataccctgcactgtttttacacgatacatgcctggggaccagggttttggaaaaaggacctggagggctgagctggcagctgaaaaggcagggtaccaggagccacccctcaatgggctagggctagggacagagctgggagccactctacagtttggtctgggtagatgtggggggtgatctgagttgaggtacatgtttatagcttttgaatggagaaggtaggaggttgatttctggcaaccagttgagaaccatgaagcgggtgtgtagaaggcaaaaggggaaaaccaggtgaatgagaggccatggtaaacccaaagggggggcacgggctggggatggaacagatgaatccattctaatgccaagtccagcccccgtctggcattcctgacattcatacccatttgtgagtaaatctggcagaaaagaaagtgaagggggagacgtgagggtgggctcagactcaaaaacagtcatgtcactgcctaattgcttttatccaagttaaaacaatttttttaaaccaatgatgttagctgaggcaaagctctttaaaagaaaaaaagatttttttaaacttattgagctataatttgttactgttttcatccatgcaacaaaaaacttgggatcaaacattagaaaattaaattaggttcatgcacaaccaaagatcttttctcttgccctatggacctactgagtcgaaattccattttccgtctcctcacagcatttcagagaaatgattatcatctgatgaattgcactaaaagcaaatcactaacagatagatcagcaccattcttctattaattaatgccactgtgtgttgtgtatgtaacaaatgcaaattatcgcatagggcaacattgattttcttttccatgcattcctcagtacaattcaaatgtgttttggaaactgccctggactgggagattgcaatcattgtagcattttcctcttgatttataaggctcaattatctttctttggttgtatgaaatgtcttttctaataaaagagccaaaaagtgagagacagcatttctagcaccaggcacagaagggtgatgggataatatcaaatttcctatggtttagcaaacattgacaaataggggaaattaggattgctcatccaatatgttttggcctcaaaggattcagctaataaagtaactagaaaaattaaatatgtgtaagccacagcacctttagaatacttcacagattaccgagttgtgtcatttatggcaatgaatgtttccaggctgcaagcaaaaaatttatttttcactttacttgaaaagaagatgatgcctccaaatatcacagggaattgtttcttttgtgtccaaatgagttgagatctaaaccaacatttaaatgggcttcaatcatgaattgcaaaatgcagttgaaatgaatattgttttgctgatagtttagtctgaaagcaattgtctttttccctacagatacagtgcctccttcattaagtgacttttagttattttttcataacaggccattatttgtttgaacaaataaattaacctggggagaccaaccatgacccgcattggacttttctgcctgtaagcaaggcgtggtccaggagtcataggttacgtgatgtatcactggctggtgccactgattccactctgagtactgaagctgtgggcctgctattaaacaaatgtcccgaacacccaagtctccctgggcccccagctggctgttgctgacagtgccacacagtcactgtgaggacagaagttccacggggaaaggggaggggcatgtgcctggcaccaagttatgccttcagtagaaatgtgtccagcgtgtgaatgttcacgtacactctgtgtttgtgttgcccagtggtacccaagcgtatgcctgcacccccaacaagcttcttggggttttcattaaggacatttccaagctcccaagtcacttcctgtgtgtgtcagaagtggctcttttcatttccaagactgtgtagctggttggcatctacttgtacctacacgcccacacacacagcaggagccgcgggatggtggaccacccctcagctcctcctctctgggtcctcagtcaccacctaacccaccccagtggtctcctccaggttctggtcctgtctgtccatccgctgaaaaactgaagatgcttagagtctaaaaaacttgagtgaaaccctgaaacactaacctgatggaaatttattatctaatttagaagagaagcaagtgtcttaattgtctccttgttttaaccaacagaagagatttcacctgggtctccaaggcccagctgctgagacttagtaactgaggctaagaagctatctcaccctggttaaataaacagggtccgtgattgatggtgtctgtacaaaaacgaaatgtagtcaaacagagtaagcagagactgagcaagcatttactaacatgtgggcatctgacaaagcattcttacatttgtagtctttaatttgacacagagattttgtctgtaatgtctttggccacttttgtgtgttcattcagtgattcacaaagacgaataatttcagtgccatgtgtgattgtatttcaaacaaaactgagtgtcctaatctggaatatagtctccatttcattttgtaggacaagatagagcagtttgtttcataccattcatttaaatcattttttttcctaaaagaaaagctttcttaagtctctttcttaattccttcatttgcattcagtttgggtggagctgattgatgacgtgtttccgtgtgagcttcatcgaggatctgtgcttgaatcatctagtattttctgtaaggtcgggccaaggagacctaacgtgtgctaaactttacaagcacattttagacactgaaaatacactgccgtgccttgcaattgcacaaatcatttaagagcccctctgtcatgggaataagctgcctccctttgtcatgcactgtgttctgtattttcgaaaggaaggcccagcactgaccatatttcctcctacaaggccccagcccatcagcacaagagctcgtgaggctgaactcaagccccggagatcaaaagtcccatactgtggaagctttaagtatctcattcaggattccatgaaacattgcttcatttctcaatacgtctgtcctccgaaggcaccaactcattcagttgctaaactaattcttcattttcatgtaatcttttgggagaataaaagtgagcagtactaaaatgaaagtgttttttaaacaataatggtgccagaacatgagatttttaaccttggcaaacaaagtattttagccactaaaaaattgcagagctgtaagaaattgctgaaaacttcaatagagaaaaattaattccccgttatgcttctctttttagtaacccatcgacaaagaagtgaattgtcctccatgttagcgaagtggggaggtccagacttgctccttgtctttctaccattttctaccatcattgtatgtaaaagtctaatcttcattttaagtcagtttatgcttcccagactaaactctgcaacaaataatatgaatgtcacacatttcatcatttgtaattaattccaaactaaataaaacaaggagttgtgaaagttgtttttcccctaggatgttctacgtacatttagtaatagtttattatggctttatcttttaaagtctactttcgcggcactttttaacttaattctgttaaactactcttggaaactatcgattctataaactatgccattttcagagacataaaattttgtgcctgaattataattatagcctaaagccaaatataatttagcacattatcagactgggggtatttttaatactaatcagggaggaccctcactaaatatggctttgttcattcaaaaatcgcacagagccggcgtctccgtgacaggtttggagagccgcacgttaatatggttagttctaagtcagccattaaggaaacagaatggatcacggggttcatagagatggagcctcagtcctcttctcctatttatctgcattcattcccttggccatctcaaattcagcctcacagttttcaacaccgtctctgcactgatggttccctcatttgacacccctctccccaccacacactctgagcttctaactcctgtgtccgacttcctaatcagccgctgtgcttggatgtccagtaggccttttaaactgaaggcgctcaagacaactcttgactcggtctccgggcattttctgcccctactcaggtctttggccacctaactacatgggaccactatctatgatttaccaagaaccgtaaagttatcttgaagtcctcattccttcacctttacctcctacctccaaattctgcagcagcaaagcactgctctactccatggtcttcatgaatctgctcacccctcagcgcctccacctctgcctcttgcctggattgctgcaacggcttctaaaaagtccctctgcttccgggacagcccatcgtccactcagtagccagaatggtctttctcaaagttcaatgagattttgtcactcccttgcttaacatcctccaatgatattccatgacgcttagaatcaatgtcagtgcccttacctttgcatataagaggtaacatcacctcaccctatgtatctccctgaccccatctcatctctttcttgtttgatattctccagttgcatcagaagtcttgctgctcttccagcacaccaagattgatgctgcctcagggcctttgcaccagctccttcttctgcctggacactctcgccctggttctgcgcatggctcctttctcctttttgtttggattgctgctcaaattgtgcctccacatggaggctttctaagtgatccagacctacaggctcaggcacactctatcccctcactctgttttcttcttcataatatttacaaccatctgaaatatgtaatgtttacatagccgtttgcttaatacctgtaagattccaccaactagagaggcagcatgtgagaacaggggctctgtctcactccgtgtcagctgcctcttgcccagagggtgctcagtaagcatttctgatgattatgtgacgttagaagccatcacttacatacaaattttctcattccttgttcaacatttacacatatttattttttcacaaaggatttgaaacagctttaggcaaaaacaaatacaatgaaagtcaaaaatagaaaacctagcaccaaggaaaaaaatacaggagaaaagaaaaacccaaagcaaggtggccagttacaacattatcatgagaaagtaggaaagcacagagtatactgtgctttaacagaataagacttttcctaagataaaattctaagtgaaggtcacacagtacagggcaatgtcctcagcagtatttgtaaagcaaatgcagtgggccttttcaaatggctgtttctttgatcatggccaagggcccaaaagaaaatgcagtataatgaagggggatcattaaggggctgagttcatacgctccaagaatagagtgctctggtatccttacttgaaccaagaaatgacttccattctagaaggtttacctaataacataaccagcattttttattgctaagaattaaagggagtttcataattcaatgaaaataaagcattaaagaaatgctagtgtaaatatgtgtccactcatattgctctagctagaaaccctcaatctgccacaggcctgccacagccctggaggagcgctccttatgctccttctgtgaatgttctcccatatgtttcctactcccttagaaaaataggtattattattattaaaagcattaagagatattaagaattgcaatgtgctttatattatgtagtttatcttctaaaaaattaaaatgcaaaattgtcatcatgatggatcttctgtcacatatagattgtgaagttcaggagttggtattgagcagaacctgcttctaacaatattgagcattcctttgaccacagtttgatgaggtcccaggagcacgctctatttttaaaagcattacttaaaaagcactcctggaaagtcttcagtgagcctcaggtcaaagctgcagtcatttctattaggacccccctccataacaaacaatctttaacagacaccaagaagcctgctgttaacacaacctcctacttcaccgtctacctgccactgtcccatctcatcagtaaacaagcagctatttgtctctttccgttaaaagcacctacccccaacttcaatcagattaagaaaaattcttttctactttttccctgtgaagttggtttttattctatgtattaaaaccagggtcctttgaaagatacacttctgtaacattggcacggtagagacacaactgcatgttgacgaagtatataacctctccttccagcaacaccacagacttccaggtaaagccaaagactcgttttcctatgctgcaaagccatctccaagaaaatgctacctccatgccccactgaatggcaacaagggtcatcaatattttgcaaagggcaaatagagaatggcaagaaagagacacacagtgccaggcggagaggttgttgaatgttgcatgggtggggtgaggagcctgtcacaatcatgtgccccgcaagaaagattcccttctttgtttcattcagctgtcgctgagaatcaaagaatgcattagtaattgctattgtttgtagcatttcttgtggttcatagccagatgaccatcctttactgaaaagcttattgtgtggggattgctcagcaccctttcaagatatctagtgttggtttgcggggcaagaggggagtgcatattttatgcaaaaaaaaaaaaaaaagattttgtgctaccacattcctcaattattctaatattttccccaatagaaatatttcctcataatgcaaacacactattccgagaagcagaatacttttctggatctaagttgtctgatggtttctctgggtgatgtgctgcatggcaattgctttcccatgaagccacagaattcccaatttccaacaggagcccaaatctaatccaaaactctatttcacatctgacaactattaggttttctgatagccttgagtaagcaatgacatgtgcttctttctagaaaaagggcatgaccctctgtccacttaagacgaagctgagggaggccaaggcggccagatcacgaggtcaggagatcgggaccatcctggctaacatggtgaaaccccgtttctactaaaaaaaatacaaacaattagctgggcatggtggcaggcgtctgttgggacactactcgggaggctgaggcaggagaatggcgtgaacccgggaggcagaacttggagtgagccgagatcacgccactgcactccagcctgggcaagagagcgagactctgtctcaaaaaaaaaaaaaaaaaaaaaaagacaaagctgagaatctggtttgttcttaatgaaaccaatagaaagtcggtcacttaagttttcaatttatagtgctttcttagccataacagaatgagaaacatgttttgatcatgtctagtggcctgtacgctgaaacaaggatgcacgcaaagtctctgggtcaatattatgttgcctgtagagtggaggttgccctcaaactcaaatttctcactgcattccaacattatggaaatggcatggctaatcatttcaaaagatctgaaaatactaatacattttcaaacatagaaattgtccatttaaaaaaaaacatgcccattatccagcctttcaatatgattaaattcatttgttacatttatttgatttgtttggggccaaaatagccggctggcaagtgcatatcaccagtacaaaccttaagttatgaatatgactgaaaggtcccaagttaattctagttaagggcatgagcctttcagaagggggatcctgatgggccggaagtggagccaactctctcgcctcctgtgcctgcttacattcctggtttggagcaagttattagattccatgggacctagtggtctccgggtgctgtggagattgtgtcggatgccaggccacgaagacttagcaaccagcgaagtttctgtggtttcctggcagcagaagttgactgtgaagtgtgagtttgcttggatgacagggcacccggctccgtggtgaccggcttctgggttggcttctcagtgcaaactgaagtttgagtcagaaaaggctgttgtttaaattggagtgtcttttatgccaaaccaacatggatgctcctttgttctcaaaagggaagtgacgccagctggccagtctgaggctaagtatttgcacaaaggctgaccagatgacacacactccttgcccattgtggttcccaccgcagggaatgtccatggcaaactctctggaatgatcctctaggactgccactcttgtgaatagttggtggcattcttccaagtggtcataaggtgatagacacatttttctgatcatcacattgtccattgcaggaaacaacagttgcaccatttttgtaaatggtagctaatgaagcaacacaaagttctgataaaataagaacagaggtaacaaagcaacagactgccctcttaatggcgccaccaaaatgtgctgtaagattgaatttgcaccataaccattgaaaaataggaagtacaaaaccagagatatttttccttcccgctgattgcctggtcatgagacagactggaacagtgcttggctataaatttgttagcagctgaaatgctcgggggccccatgcaccggagttctgctcctccacactgcttctgcagaattaggagaaagcattgcattttactatcttttaaaattatgaatattggaaactttgctgaattcttttatcagttctaggagctttctggaggagtctgtaggtttttcaaggtaaacgatcatatcgtcagcaaacagtgacagtttgacttcctctttaccaatttggatgccctttatttctttaagaactagaagtagaactaccatttgatccagcaatcccactactgggtatctacccagagggaaaaaagtcactattagaaaaagatacttgcacaagcatgtttatagcagcacaattcacaatttatgtttatgtttatagcacaatttatatttattttatagcacaatttatatttatgtttatagcagcacaattcacaattgcaaaattgtggaaccaacccaaatgcccatcaatcaatgagtggataaagaaattgttgtatatatatatatatatatatatacactatggaatattactcagccataaaaaggaatgaattaacaccatttgcagtgacctggatgagactggagactaatattctaagtaaagtaactcaggaatggaaaaccaagcatcatatgttctcactgatacatgggagctaagctatgagaatgcaaaggcataagaatgatacagtggactctgggagcttagggggaagagtgggaggggtcagggataagagaatacatgttgggtgcagtgtatactgctcgggtgatgtgtgcatcagattctcacaaatcaccactaaagaacgtactcatgtaaccaaataccacctgtaccccataacttattgaaaaataaaatattaataataaaatttaaataaataaataaaattgtgcatattggaaaagaactgggatcatgcagcctttattgggaacttctgaaaccttatctctgcactttggaggtcgttgcacattcgatagtgatggagaacacgtcggggacttcccggaatgcaatgattatgtattttagtggatcttaaactggtttcccaatattcaatcataatctttggcagcctgagtggcagaaacatttgctttctatggggtcctgatttttagctaatattttgggaacactcttagtgtgtattaatcgtcctcttctttggccatagctcatgaggtcaacagtataagggatgagagtgaagatccctgttactcatccattctgtattgcgctgctcggacctccacaggagaagttagggcacgaaatccaagtggcagctcattattggcatgcaatgtaaaatacaaattccaggatgctcagacttccaggacatctgagatatagcctttggaaaataagaaatgggcttgcgatcatagttagttattactactgggggccgtggggcctgatttggggtctttatcatctactagctgagcgaccttgggtaaattgcttaacctttccatggttcttcaaatggaataataataatatcaactctgactgttacatggttcgatgtaatggatgaaggttgaaggagacaaggcacctgtatacctggtctaagccacagctaagcacggtgtctctgcacagtaaatcctcccgagctgtctggtgatcagtgttgccttttgtgttgcttatccacaccgcaaaacgctcccacgtgcgtttcctgcctgcctcacaattaccccacaagacgggtgcactgcatctcacagaggaggaagcagagccaagagacaggcctggtgcacgtgagggccgcagcccctgctgctgtgagcacgccctctgcacccactgaatattccccaagcatcgctgacgctcggccaggcgccggccttcgttcctaggctgtcatctctggacaaggcagacgcaggccctgccttcgtggagtttagatgagcagcaggggggcgacatcatcggggaaacaaatcactgcacgggtgattctgggatggtaactgctaggaagagaatccagtccaggcaggggccggagagggctgggtcccgtggctctgactgaggaggtgacgcttgaggtaggcgctgatgagagccccgctgtgaaggccagaggggcagtgctgcaggcggggctcaccgtgcagagtccgtgactgtcatctttccactcctaagttttggcttagggattgtgaactagatgctccagctttcaatttgtcaactggtttatctcctaacggacacctcaccagtgttttcctcacacattcacaaagacgcttttaacctgttggcaagaagcagatttaattggaaaagggtctgattcctaacagaacaaaagacaaagtatattacatgtagtgactacgttatactcttgtgcagtcgcttacaacttcaggctgggtcaccaaggagatggtgagtgagctttgaaactaaaagtaagcaaattctgactaagaatcatgtccagtgactgagtatgtgtgtgtgtttcttctccattgctgctttgacctattcagatgtcaagaactacaaagaaataagatgctaaagaaatcagaaaatctggccaggcatggtggctcgtacctgtaatcccagcactttgggaggctgaggcaggcagatcacttgaggccaggaggtcgagaccagcctggccaacgtggcgaaaccctgtctctactaagtaaaatacaaaaattagccaggcatggtggcgtgttcctataatcccagctactcgggaggctgaggcaggagaatcatttgaacccaggaggcagaggttgcagtgaggggagatcgcaccactgcactccagcgtgggtgagagagtgagactgtctcaaaaaaaaaaaaaaaaaaggaaagaaagaaagaaatcagaaaatgtaaaaaaatagatgagctcttgtgatatttctaagaaatataattctattaataaaatcgaattggttggaatccaaaggcattttaaagtttcagaacaaattaaactttttaaagtttcaggacacatgtctaaatgtctgtctatctaaaatttattttaggggtaggagggaaattggagattgtctatctaaaccttcttattttacaggagaggagactgaggcccaaagaatttagccatgttgtataagcttactcagccaggtggtggtcaaatctaccctagaaagaatgttccccatcacctggcccaaaaactgcactgtcagttttataaatagaatgcacgttatcaggaccagagtaatattagaagagattaagccacacaaaactatcttccctcaccaggtgcctccttgagcctgaaattccactcttggataatcattcttggggcacacatttccgagttggcctgctcctccaaaggacgtgctcccggccctgcagtcactgagtgccactggagcagggctcccagctctgagagggaggggcttagtgttcctggagacccctgacggggagccagggtggacggctgcagtggcaccccaagctcactggaagccttggggacaagggaggatccaggagaaagggacgggtgtagagcacagggcagaagcggagggccagccacttctcctgctaccaccagggccagccctgcctctgcatcttgggcatcgggacagcagcaatttcaacatagccctgagccaacttaaaatgcaacagcactttaaaaaaaatctcattcatcatgtaatatgtctgatcttaaaactgacatctgattttttaaggcagctgctctggaagaaattttctgtggatcgcaagagtctgaagccccatgaatgaccaaaaatatgcgcctgaaagagaaatgcgctgatgaagggggaggaggatgggaggggagactctgaaattgtttctcactttagggaagaggcacaacaataaaaaacatgaggccccattgaagtaggactttaaattccacccgaaaacaatcccaacaaacagatccattgttatatgttttgctacaagtaatagacaaagcaattgtgaaccaggacctgagccctcccgtcagcacatagtctgggttcttcagctcgcgagtgggctcagatggcctcagaaatgtagtttgctctcccctttaaggtcactgtccaggacgaggtgaggtaaacaagggttccaagtaagccatgtgttacccataattgatcaagggaagataacagccatgaggctgtcctggacccctgcccgtgcagcagggcagaaccattgccactctgcccagaaggtgccccctcctcactcccttctctcgtccaccccataggccagcaggatttgaaggaaggaaaacagttacagctgcaccactgggcttggcctgcactgtgctgatgtttttaaagcgtgggctgtaacagaagagatgatcttcagcctcactcttttcctggtgcctcctcagtatcttaacaccttctttttctaatcaactatttaattacacaagccacgggctttctacgtcaggttctcccttacacgtgaaaccgaggctcacgcagcacatgagaaacaacgtgttgccctgagaggttagcaagttaacctggacttagacccatcatcaaccaaagaacaagaaagacccaatgtccatggcaacatccagctagaatagcacctctccctaaaactggattttgcccggctgcagagttctgtgctgtctacatagaattgttggtgtcacctgggaggctcaggaaaggagagcccgaataaagaggaagaagaaactgcaatttaggtccccaagcccaggaccagcctgagagaccaacctggccaggcttggtgtcaaagggtactgcaaggatttccaggcaggcaggcaggtgacctgaatccaggtaccttcaatgtccaggaggtgactgacgggcagcagccactcaggtgtttgcatagaggcaactggacaccatcctgcaggccaagaggaggtctgtgcatggggcaagaatacaggctctgtctgagggtcaagcaggatggcaggttgtcaggcacagtcagcaggtgggcagccagggagaaagagacctgggccttgggggcgacccacccaatcacctgggaacaacaacaggtcctgattctttttcttcttcttgttctttttttttgaaacagagtttgagacagagccttgctctgtcacccaggctggagtgcaatggcatgatctcagctcactgtaacctctgcctcccgggttcaagcaactctcgtgccttagcctcccaagtagtgggactacaggcctgagccaccacacccagctaatttttgtatttttagtagagatggggttttaccatgttgtccaggttggtctcaaactcctggcctcaagtgatccacctgcctcggcctcccaaagtgctgggtttacaggtgtgagccaccatgtccagcccctgattcttactggaagcaagggggcacaaatggtacaaaatttttaaacagcagaatgtatcactattagctttataacttccccaactgctttcactctttgaaagttattatccttccagaggctcatgtactattctacgttctgctaatttttctatgaatttttaaacatatttgactttaattttcttttagttcacaggataggatgtgtatctgaaattaatttttctctaatgtgctatatctcaaaatcagctattaatcctcccccactgctttgtactgcctgttttactgtatattccattctgactcaaaattcagtctatttgcattagtttaacaaacacatgctgagtcccaccacgtgcggggcactattctgggtgctgaagatgcaacagtgaacagcttggctgtcacatctgtacttacagaggattctcgttggaggagacaagataaacaaggaaataaactatcatctatcacatggtgatcaatttcatgaagaaaaataaaacaaagaaggggaatagaaaattccagccaggtggtgaggtgcaacctaaagccaggtggttagggaaggccttaccaagaaggggacattgacaaagacccccagggatgatggatccgtgaggaaaacgttccagcccacagaaagcacatgcaaaggccccaagaagggacacgtcggtgccttgaaggaggccagtgcccgagtgaaggcaagagtggtaggaggtgacagggaaggtggccggcagttcatgtagagacttcactgtgaggacactgacggtgaccctgagtgagacgggaggtccatgtcctggggatgctgtaactaatgaccgcaacttggtggcttaaagaaacagacacttatcctctcacagttgcagaggccaaaagtccgaaatcaaggtgttggccatgtcgtttccttcgagaggctctgagggagactaaaggcagggggaaccctggatcctggcagttgcaagcgacctttggtgttccttggctcgtagacacatcactccaatctctgccgccatcttcacgtggtcttttcttgtctgtgtctcggcgtctctgcctatctgtctcttataaggacacaagtcattggatttagagcccattctaactaaatctaggatgttcttataccgagatccttaataacatctgcaaaaaccctatttctaaataagggcacactcacaggtatgcaggttagcagtggggcgcatcttttggggagacacaactcaaccccgtacatgttgagttgagaaggtctttgaacacaacagggcaatgatctgtgttaaagggggcattctgggggctgtatggataggggtaagggggttcaggcagcagcagagagcccagttaggaaagactataccagttatccaggtgagaggcgcagttggttgaacaagtcagtggtggtataagaaatagttccatgagactaattacgtaagacacagaaggagccgttattcagaaggtggattctgatcccttagtcagttccactcatttaaattgttatttttttacaactatcaaactacgttcattgctgtttctctatgttttcaaatatctcatagagttaatcctcttcttccttttcttagttggattatataaatctattaatttgcttgagacaatattttccttctccttcaggaatactgtatatatgtaagtgtatgaacagatagattgattgatgtcaacttattcaagtcttttattatcttttaaatattttttaacttctttatagctaggacacatgcctcaatagatttattgccaagggtctcttgtggaaaaggggttgatattgtggacaggatttatatttttattacaacaactggtgccaactaataattaacaaggctattaattttggtatgcttattttagatctagtactttattgaatcattttattaaatattattatttccgctgattcctctgcacattctggttttccattatattaagcacaaataattatcttttctctcttcccattattatacctctttatttttttatgtctcattgcattaactagagttttcagaacactattaaggaatcattcttgtttccatttttaaacagaatttacttcatctatccattaagcacaatatgggctcttattttccacaactttttatcatggtagaaaaagtagaatctattcctaatattttaatatttttggaaccttattaagtgttatcagttgtcttttagacatgtcatttattttaatttaacccattaacattgtatacctttttagtgtatgctgtcatgttggatttcttgcattgtggaatataccttccagcagactcctttagatgggcttaaagcaagatttcagggtgttaatttttgcatttctttgcttatttttatgattagggatctgcttgatttgggtgacatcctcattaaaatcaatattctcgccgggcgcagtggctcacgcctataatcccagcactttgggaggccgagacgagcagatcacgaggtcaggagatcgaaaccatcctggctaacacggtgaaaccctgtctctactaaaaatacaaaaaattagccggcaatggtggcaggcgcttgtagtcccagctactcgggaggctgaggcaggagaatggcgtgaacctgggaggcggagcttgcagtgagccgagatggcgccactgcactccagcctgggtgacagcgagaatccatctcaaaaaaaaaaaaaaaatcaatagtctcatattataatgttcgtaagaactatgacaccttgggagagggtcttggagaactggctaccaacaatttttattaacacttctggcaaaagcactagctttcggtatcaacatcattatgataaaaatgtgtttatgaaatgcctctaataatcactaatgctttggtgtggttccaaatagttcttgtccccgaggaactaacaacacaaagttgtagattgtgtcagattttgcagttcataaatcgtctccacatcaatggtcatggggcagcattattagacccatttttacaaatgaggaatctgatacctgacaagaataggaatttacataaggtcattaagcaaccaagacaggcacagacagaacttgaactcaggagtcctgatcccaaccccgtgctcctttcaacgtgccacactgactcaacacccagcaactaacaacattcagcaaaagcatgagaagacatgatgttctatgctaagactggctaataactgctatggggagagattggaaagggttcttctggaatccccatgctccccaatgccacttcctaacaattatccccattcaccgtgtagaaccccattgctcctttaacattcaggccagttagtggtatcgtcctgtgtccctctcacttgtgtcacctgctgacctcttcagccactgaaccatactgattctagcatctggcccagaagcctccatctctgtcatccgaggtgacctggtgtccatacggaagacagctccgaattcttccttgacctcttcggctccactggtcatttgggcatcacttcagccatccagacccacagcctcagcctcactttggacctcaggaggacctcaccccaaaatattaagctctgacatccttcactctgactataaggtcttagccttcatctctctacagtacgccttcccagctgttccctcacccaggtctttcccatgttgccccatctgtggcccctttccttgccttctccaggctgggtctcagggttgatcgctaggactataggagacctcccatccgccccgctccacccccagaggctgagggatgaggggcgggcagtggagctgatggaggaaggagaacaggattctctgaggagctgcttcaggctaaggtccggtcctctgatgatgtgctggtttcagagttggaagagggtgtgtgcctgtgtgttcctgatgtcctgatgagggtgccccaggacacacgagggccatcccgcccctccaagccccagcccctggcttatccttggtgcctccagatctcactccaactctcatcccccttcccttcccgatgttttccctgcagcatcgtccagtccccaagcacttccatggagctctgctcactgccgtctgggccaccagccagcacctcagcagccccttcagcgatcgctggcatgggctctgccttggtctctcctggtctgacgccaacccggccgcttcatttcctgcgaggggagctctcttcagctcccacgttggtccaaattggtttggtctcttctagacctcagagcccatacacaaagaacaaaggccagttagtctcccactctgcaattattcaaagttcgggctttaaaacgcagagatttttctgcttcatctacccacagctcagcaactgtatttctacacctattgttattctatttctgttcctaattgctattgtagaaaaccgtgcctagctgaagcttcgggagttgccaatccgtgggctcccttcaaatgtaaatgtgttatgcaaatgtcttctgaggctgggagtgggatcctgtggtcttccctgggtagagacagggaaagaatactgctgggatggctgagaaacagaagacaatccgctgccctcgttatttaaacgctcactgttctgagatggtttcctgtctccaacttcctctcctgctctagcagctgaatttaaaatacttgctacagaacactgcttcttctgggcagggaacgctgctgcttaacccttccatgctcgttccctgtggggacacagcgtgttggccagctgcacctctcccagggtctcaggaccatgtctgtaaggtagatgctattcgaatctaggaaccttttttttttaatatggaaaatcacctatctaaataatgcattgtcatcgttagcaaaaccttaaagcatcagtactggtggagaccttgccattccaagcagagttcgaatccttccaaaaacagccacgacatcaatgcaaaaaaaatgttgttttccaggagtgctagtcccatcgggagagctccttccctcctccctctgtcttcccggctccccatgttcctgagcccggagctgatctccgcctcttctgccctcagcttagctgcctgtcatcatgccaggcaggcactggattttcttttctttctatttttttaattttactttaagttctgggatacatgtgcagacagtgcaggtttgttacataggtagacatgtgccatggtggtttgctgcacctatcaacccgtcatctaggttttaaaccccgcatgcattaggtatttatcctaatgctctccctccccttgccccccaccccctgaggtgctggattttcactgtcctgagattttcactctccctcataccctctttgctggcctcccattatcaccagcagcaatttggtccaaagaaagttctcagcttctgaatgaatgagccctcaaacccatgagctccttgactcagtgcttatgctgtgctgagccaggcactcgcaggacactcggccctgctggtcagccctgctggccgggggctccacatctgtggatttggcaaaatgcagatctgaaatacttggggggaaaatatgcctgtactgaacatatacagaaattttttcttgtcattgttccctaaacaataaagtataacaactatttacatagccttacattgtgttagatatgataagtaatatagagatgatttaaaggataccaaaggttgtgcaggggttatacgcaaatactgcaccatttagtatcagggacttgagcatctgtggattttaggatcacccggggtcctggaaccaatcccccaggaatacggtgggacaactatattaattaattaaccttttttgcatttatcagtagtttctgtgttcaatattgtctattgctgctatttccaagatgtggggaaaaggtgaccacaaatatatagaaatgtattctgtgcattctaaaataaattctaaactatatgaaagtagagggcaaagcagaaaatgctggaaaaacggccctggcccaagactttgagctgtttgtctttcgtttttcacactgtcgtgttactcagtagtcctggcagctctactgtaccattctgaatttcagagaaagaaaggggagctaactctgccctggaatattatttatgttctaaagtgctaaaagtactttcaagcgcaattagcttatttaagaggcagagattatgttgttctctgcctacctcatcgggtcactgggaggatcacaggcgggggaatatatatctgtgttttgagcacagtaggaagaaaatctttgtgtaaattcaggttggctttataatgatccggcaagattggaatatctgatcaaagcgaatcactctgatctactcagttacaacatgatctctttttttttttcagatctaataatatatcacaaattgacatgtgcttgtgagaatgatttgtggttgatctcgatgctcagacatggccatcggcattccaattattccctcccctttacttaatttcactacagacttgccccatagctcatggttctataacagtctctgacttcatcacatttttatcaggaaacaaatggatcactggcttgcacaaaatacaaatttaggccaggtgcagtggctcacacctgtaatcctagcactttgggaggctgaggcgggaggatcacttgagcgcagaagttcaagactagcctgggcaacatagtgagacccccccccccatgtcaactaaaaatttaaaaaattagcccagtgtggtggcgcatgcccaggtagtcccagctactcaggaggctgaggcgggagatctcctgagaccaggaggctgaggctgcagtgagctatgatcacaccactgcactacagcctgggcaaccgaacaagactctccctcaaaaataatagtaatatataaatttgtctgcaattgtgaaaaataaataaatttacatactagatccaaggccctgagttttaacttgataactggggccaggtatcttacagaccccaggaggcctttcaaacccgttacttgcgtcgtcatgccaaggggctgagaacccttcccttcccatcccgagagcccagaaagaattctgcaactgtctgtgagccaactagacttgaacaggctaactgacctgctactcaggaaagaaacattagcttgctcacaagagcttccctcacagacttggtacagaagtctaaggatcacgtggcggccgcagcctctgtgtttctgtcccctgagtcagcacgtacagaacacgctgtgcgccaaggaccagaccctgctgtggagaaagctacagtgaaaggtcaagtctgtgcagaaatatgtgactattgaacaccctcctcttctcaatcacaaaagctctttataattcctcctctgcaggcaaaaactgtgggaaactctcacattaggcagaatttttttctgacaatatctggaaccaaagacccacagtcaggttaaaaatcacattttcattgaaacagtttatgaaaagcctattacctagcaattttatatttgaatgcaattatgttaatgttattagtacattatgaatggtactaatatgattattgtttcatgtggtattacaggaaattaattcaaatggatttacatattttttagataaagggcactgctaacacggataaataagaagcctgacgttactttaaaaacaaaagatagcactgagaaagccaggttgtgacttcatttgtaatactaacacaccatttttgtgcttttttgttgatgtaaatattttgcaatttccaaagtgtttttcttgttgaatgcagcaatctgaattaatttccccagcctctgccagtgtgcctttagcccattttatacttgagggagttgagagtcaagagaaggaaacttgccccaatttatacccagaatccagacagtgcaagatgcaaactcaaatagctgagaactcaactcctactgttagatcatcggggaatgtaacttctcacgtcgaatcattcagagttgtaattaagtaaggccggacctctggaagctctccttccctggattttggtgaaaggaaatgcttgtttctgcactgggcaaggctgatttccatctcacagtacactttctgcatctcctgcttatccagaggagaccccaccagcctcccgagctccatcgtccctcagagtcactccgcatccactgcgcactgctctacacactgctctgggctagtcacactgtgctgctggagacaaaagtgtgagcacaaaacaagccagcagcaggggacactgtgtgcactcagcccatgcaaacagtaggtgccagccgaagtcgttcaagggcgacagagcggtcacaggtgtggttgagaagagccgcccagaaacaagatctgggctgggcctagacagagattggtggggcagctgaggtgaggggagctgtgggtgcaagggcagagggcaatttgcagggtatatacacggtgagggcagagcttccgctggttggaaaatagggggtgaaactgagttggggacaaactgcagattacctctaggcttaggacggaggagttgctgccaacttttaaacacctgaaattgataagggagaagctgcctctgccaaaaccaatctggcaactgtgcacagaaaaacaggttaagaaacgagtctttcgcaagtatgtaggcctggggtgataaaggcctgaactacctaggagggatggcctctgccccaagccaaggaacgctatcaaatctgataaactagtaagctgggaatgataattctatggtgatagatcctagcaatggatgatatgcttttaagctgaaagtgctttgaggactagtactctatcttatttgtctattttcagcttgtagtaaagagccggcttccactcctgctgggtgaatgaacgcatgcatgaacgaatgaatgcaggcatgtgcgaatgagtgggctctaaagatagtatgttgtagataatttcctgactaatgatagggattccgaccctgataggcttacaggaagctgcctctcagtcggtcctggtgtgggtggctccatcacctgtgtgcaggccccttctggtccgcatccttttccctggatgaggagggcctgcaggctgacagtgacaggtgttcctccagtgcccgtcaggaatgcccgggctcccttcttctccagggaagggggtggggggcactcttcgggcccgtgggtatttgttttaatggaagaaatgtgggtaaatacagtcttcaagcacagaatgaagtgaggataatattaattactaccttcggtgattgttgtgaggattaaatgagttaatatatatgcatagagtagtcgctgatgtatatataataagcatatagtgttagctgatgttattattatttgttattactaaccaaaccaattgtcccacctattaaattcttaatatttccattctagaaataagctaaataagagcaattccttaaattctttcagcagtaccaactttcctactttcccttaaagccacagttaatttctaagtagctagttgacatgttaatgatcgaggttaaatattacatcaggattttattttagtgattaaagaaaataaacacctaaacttttatattgagcatttaccataattccgagtcaaaaattaatctaatattttgactactgtacatttcacttctgcaaataaaaatttgacccataaatttaaatggatgttggtgcatctccaactatttagcattaaattcattctgtcaacactttccaattatcttctcataagacaaatagtaacagaccaattcctaaaaagtcatttgtgtttaattgaattagtagttgtgtttgattgaaatatgttaaagccattataaaaataaattcttttcacttattggtgaatttttctacctatgctgtcaaaatggctagaaatatcaattacaaactttgtgaatgggaagtggaaatgtccattctttattctttcagaacagataaaaatactgtaaaatcagaaaccggatttggattttaaagactataggtaagtaataccggtaaataggatatctcgtaaagagaaaatggactgtggcttaggaatttaatgaaatagaggggagcggtaattttgagtccatttaggattttactggcttactgtccagcaagaggacttagattaaattattggttttctgtgaatctgaatttcctggtctgtgttgtcaggacagggatggaactttggggaaatgtgtggaacagatgtgtgggagaagccagatggggccaggatcttgggtctaagagagctttctgtaaactctgtagtctctcatgctcatctaacctccttctcctgatttttttgctcacatttattgatcatttactctatgcaagacaaaattctgtgacttttgcatgtattacctctcaatcttcaaaacagcccacagattaactgcttatgtgaccctcatctgacagatgaggaaactggaagctcagagaagtggatgctttgcccagggctggagagccaggctggggctgatatcccagccgtcaaatgtcaggctcctgctctagaccgtggccacaagatttggggaaagttccctcttcccgggcagcaccagttttatgagcacgttcttccttcctgcccaaatgtatagtgagcccctcatcaaatggcttaacttcaacatggaacacgtctgtcacacaggaagctgcgtgcccagagcctggccagagaaccagggccaggggcatgaaagcaaaaaggcagagggtactaaagaccccaggagcttgatgctgaggcagtactctggataagtcactgtagggaaaaatgctccacgtaaactaagctcttcctgaagctttcacactgggagagggggtctgccactcgttggtgctgggtaggcagaactcttcatcctgggaccacaaatgacccctgcattcttccatgagctctgggcttcactgtcagcacagtcccatcagtgacgagtccccgcctcttcctaactgcatgatttatcttggctcattcatttaccaagaaactattgaatgcctactaagtgcctattattcagcagttgtttagtcaagaaatgagccaacgtacaagaacagaaggcagcctgcttctaagtcctagttttctaaagtacttttaagatcagtcatatccagtgggaccataatatttcacaccaattctacaaaaagctacattcaattaatgaaaagcgtaagttatcaaacatgtaaaaagtaccatttgtttctttgaagtatctactataagtcaaattttattaatgagacattacagatgacctgcctcaaaggttagattaaaaagtatttttgcatatcaattctatgtatatgtgcagatcttctaacctattctaaggtgtcataaaatggtttattcttagaacaatcgtataaatcccctgtcacatttaaacaatttactctgtgagtaaaggcttactaagcaaggaaactcccatacggtccctaataaattattaatttcaaataaatgtagtctttctctcccaatggctcactctctgatgtttctcatgcttttcagcactgccagatctgagaaataaaacaaagtaacacccaaatgagttacttttaattctgagaagaatttataactaacagataagatgttgatattttcaatatgtggctttagaaaacattaaagtaatttagaaagaaaaatttagctagcttccataaaaatttagcacattaatttaaatgaataaaatttaacagaaaagcaaaagtacgttatagatactttgaaagtgttgaaattggcctggcgcggtggctcacacctgtaatcccagcactctgggaggccgaggcgggtggatcacaaggtcaggggattgagaccatcctggccaacatggtgaaaccccatctctactaaaaatacaaaaaaaattagccgggcgtggtggcgggcgcctgtagtcccagctactcgggaggctgaggcaagagaatggcgtgaacctgggaggcagagcttgcagtgagccaagaatgcaccactgcactccagcctgggtgactaagtgagactgtctcaaagaaaaaaaaaaagaaagtattgaaatatagtaggatgtaagcttccaaacaacttacagtttaaaatctcaaaaataaaaatcttttactaatgtgatataatttattacttcacatttccaacactatagtaggaatattagcttttttctttcataagaaagccctaaacggtcagtttgctgttcatactttttctgatggccaaatccttacttttttttccaattgttttatggttctatcagctataacatcatatttgctgatttcattctgaatctttccaggtcatggttttgcctgcttttatgtaatattcatttgtgttttatttttatccatgcctccttgaaaagtaggaaattcaatttggattgctatcatgtttttctttctttgagtggctccccgtagcttccttcttgctctgtgtttctcctttaccatggaccccgtgtgctgctggcctgggtggaaacaccaaaatgatgtgcttccgacttcttcctaagtttgtgattataaggttttcaaattacatgcaactttctataacaggcttctcatctggcaaatgaattaaaatatttactgatattgtctcaatcctagcaacagccaattggaaatgtcagtttttaaaagatcctatcgagagtgtcaacaagaactgggtaactcctccaagtaaacttagtaagacatctgcaagacctctgtgaaagaaaccatccaagaaagatacaaaagattggaacaaatggaggcacacatcctcctggctggaaggactcacgttgttggttttgcccatccagcacctggtaacacatgcttagtttctctttacagtctcagtggggtaggcctgccaaggatcccttcccatccctggccaagaggtgagcatttggcccaacttaggccagctgggctctgcctggggacttgaagcttgactgagggtcaaagggctgaaaatgtttggagatgattcttctggttgacaggttctgtagatagcccctacatcatgccacctgtgtccatggagcttcccaaattcctgcctctttctgagacctggttcttcacattgttctttgattcagttcgctacctcctacctttccagtaggttctctttatgttccagttatctgaagttagtttccacttcttgtgagcaaaaaactcaactgttacaattcaatatggtaaagatatcccaccccaccaagttaaggagccaatgggaggcttttatggatctttaaaaaagtgattcaagtatccatatgaaagaaaaaatgggtgagaataccactgagggggaaaagaagaaagagagagagagagacagacagacagacagacagaaagaaagaaaggaaggaaggaaggaaggaaggaaggagaaagaaagaaagaaaaagaaagaaagaaagaaagagaaagaaagagaaagaaagaaagaaagaaagaaaacaaagaaagaaagaaagaaagaaagaaagaaagaaaacaaagaaagaaagaaagaaagaaagaaagaaagaaagaaagaaagaaagaaagaaagaaagaaagaaagaaagaaaggagggagggagggagggaggaaggaaggaagaagagagagagagaacaggcatttcctccaccagatattaagataaatttaaaacaacagtaattaaaaatgtgtggccccaacaatagcatagacagatcagtataacagaaataaatccaagaataattttaaagtttttaatattttataaagcgagcatttcaattcactgggaaaataaaagatcatctcataggaggtctaggtcggcaggctaaccccctggggaaaaatatttttaaaattattaggacctgtctcatatcatcacgaaaacttaaaaatacatatggcttacttaacaaattaaatgtaaaacataaaatgaatttttttttttaaatttcagtgataaggtctcatttggttgccaagctggagtgcagtggcgcaatcatagctcactgctgtctcaaactcctgggatcaagggatcctcccatctcagcctctcaagtagctgggactaaaggtgtatgctaccatgcctgactaatttttttttttatttcttgtataaagggatctcaccatattgcccaggctggtctcaaactcctgggctcaagcagtcctccctccttgcctcccaaagtgccgggattacaggcctgagccaccacactcagcctgaaaccatttttttaaagcccaaatacaatatgggcaaatataacataaagaaagaaatccaaaggaaaagatagatttgattacataaaaatgaaaagattctgtcaaaatcaccacaaataaaaataaaacaccaatgatatgagagtgacgatttccctacatcttctccaatagaaaatggtagcaaacttctgaattggttgtatattaatcagggttctctagagggacagaactaataggatagatgaatatatgaaggggagtttattaaggagtattgactcacatgattacaaggtgaggtcccacaataggacgtgtctgcaagctgaagagcaaggaagccagttcgagtcccaaaaccttaaaagtagggaagccaacagtgcagccttcagtctgtggttgaaggtccaagagtcccaaagctgaagaacttggagtctgatgttctagggcaggaagcttccagcacgggagaaagatgaaggccagaagactcaggcagtctagtcttttcacattcttctgcctgcttttattctggctacactggcagctgattagatggtgcccacccagattgagggtgggtctgcctctcccaggaccgactcaaatgtttatctcctttggcaacaccctcacaaacacaccaggaacaatactttgcatccttcaatccaatcaagttgacactcaatattaaccatcacaggtttgaatgaatctttttcttttcattgcttctggaaattgagccatagtttgatgggccttcccaattcatgtttataaagggacttgcctagatcttttgtgactttacttttatatttaaattcatttggaattatcctaatgcaaggtgtcaggtatgaatccaaatcataacatcaggtgccccaacatcacttattaaatagttcatgttttacctactggtttgagatgacgcatgtatatcaattaaattcctgtatgtatgtttgcccgcatattttaatgtctggtagttcttatccactccaaacatcgattattggtcttttaaagaatgttcctggcaattgttgcttgtgtattttcacatatgaaatttgagaccaatatgtctaattacaattaaaaacctggcatttctactggaatctctttaaatgtaaaaattaacttaagtagaattgctatctttgtaatgctcagtttccctgatcccagaacatgatgtgactttccacttgctcctgtcttacaggcccatcaactgtgttttaaagttttcttcatataggtcatataaaaactattgaagtctgtgtatttgttttcttttcttttcatttcttttctttcctttttcttttttttttttcaagatggagtctcgctctctcacccaggctggagtgcagtggcccaatcttggctcactgcaacctccacctcccaggttcaagtgattctcctgcctcagcctcccaaatagctgggactacaggcatgcgccaccatgcccagctaatttttgtatttttagtagagacggggtttccccatgttggtcaggctggtcttgaactcctgacctcatgatctgcgtccctcggccttccaaagtgctgggattacaggcgtaagccaccgcgcccggcctgtgtattaattttcaaccctactaccttactgaatttgtttgtttattcagttaattctcaggttttccaggtgtaaattttagaaaatttacaatcctcctaaatgtgactatattaccttctccttcccaagttttttacctcaaatttatttttcttgtaatagcattgactatttcctatagtaatagcactgtgtaattcttgtaatagcactgactgttttctatagtataatgttaaataacagtgaagatactggtgagggtggaactttattgagcatatttatgatatgtctccaccaagcagggtgctggcttttggactgagatagatgtattttaacttataaaggcagtatttcactcttcgtattttgtttttatcaatggtggttgttaaatattgtccagtgctttatcaacatccatggaaatgatcataatattttttacttatatccttagtatgataaaatgtatgaatagaattcatagtaatgaaccatccttacatttctgaaacaaacatttggtaatgatgcatcattctttttttttttttttttgagacggagtcttgctctgtcgcccaggctggagtgcagtggcgggatctcggctcactgcaagctccgcctcccgggttcacgccattctcctgcctcagcctcccaagtagctgggactacaggcgcccgccactacgcccggctaattttttgtatttttttagtagagacggggtttcaccgttttagccgggatggtctcgatctcctgacctcgtgatccgcccgcctcggcctcccaaagtgctgggattacaggcgtgagccaccgcgcccggcctgcatcattcttttgatatgtggctggatttattttgctaatattctgtttaaggatttcataagtgacattggtctattgtttgttctctaaaatgtttgtctttcagtatcaatgttatacttcctccagagaaaaaaaatcttaaggtgtttttttgttttgttttgtttgtcgttcttgttgttgttgttgtttccctaagctctagaaaaagcacttaatttgtggtattctcatgtctggacctagcgactttttctttttgattagacaagaatagctttttgataaccttctgtatttttcccatagaaataagactttttagattttctgcctcttcaagggtcagttttgactaattatattttcctaaaaatttcttcaatttatccaaatttcaaatgtatttgcacagttaaacaaacttatgtcctgtgtttcttttaattctcttaattttctgttactttcctccccccttgatatttcctgtttgcaagttctccattttttttcttgattaaattagatattggctcatatatttcactacatttttgtcttttaaaagccatcttttggacttattttgtagttctgctgtttgggttttctagttaattaatttcagcttttaaaatttcttatgatttaattccatttattttgttgctccttgcctaactttttgagttagtttaattccttttaaattcttacttgttaattaaattaaaatgtaaagtaatgcatttttctctgagcattttagtggcatatcataacttctgatatgcagtatctttattatgttgttttctttttctttttagtttttttttattattatactctaagttctagggtacatgtgcacaacgtgcaggtttgttacatatgtatacatgtgccatgttggtgtgctgcacccattaactcgtcatttacattaggtaaatctcctaatgctatccctccccgctccctccaccccccaacaggccctggtgtgtgatgttctctgccctgtgtccaaatgttctcattgttcagttcccacctatgagtgagaacatgcagtgtttgtttattttgtccttgcgatagtttgctgagaatgatggtttccagcttcatccatgtccctacaaaggacatgaactcatccatttttatggctgcatagtgttccatggtgtttatgtgccacattttcttaatccaatctatcactgatggacatttgggttggttccaagtctttgctattgtgaatagtgcctcaataaacatacgtgtgcatgtctctttatagcagcatgatttataatcctttgggtatatagccagtaatgggatggctgggtcaaatggtatttctagttctagatccttgaggaatcaccacactgtcttccacaatggttgaactagtttacagtcccaccaacagtgtaaaaatgttcctatttctccacatcctctccagcacctgttgtttcctaactttttaatgatcaccgttctgttgttttctattcgttctataatttgggactgtacttcctctttgatgtagaagttgtttaaataaaatcaagttacttggtatgtacctttgcttctgttaaatgtacttctttttcttttctttctttctttcttttttttttttttttgagatagagtctcactctgttgcccaggctggaatgatgcagtagcatgatctcagctcactgcaacctctgcttcccaagttcaagcaattctcctgcctcagcctcccaagtagctgagattacaggcgtgcaccaccagacccagctaggtttgttttttgttttgtctttttaatagagacggggtttcaccattttggtcaggctggtctcaaacttctgaccccaaatgatctgcccatctcagcctcccaaagtgctggtattacaggcatgagccaccatgcccagcccttatttttctattatttgatatatctgcttaaaataatgttctttaatacccaactattgcaaatgagacagcagcaaatgaactctattttccatctttttctcccttcttcctcttatttttttgttagcagcatcatttctacgttaccaaagcttttcatatgtatgttctgttttgccacccacattgttttcatcttagctcttcagtaaatatactcaacactcagcactgatcatttttgtcatcgctaggttgcctgagtattgtcctctagtcattttctcataaaggcaagaaatgatatttcccaaatgtcacatttttttcaaaactgtttgcctttagactttttatttgaagaacagtcttactggatctaaaatttctgacatattttatttcctttggtttgtatagatatttctccactgtccttcgacctagaaggtagctgcggagaattctgagaccaacataagttttctcccttttaagtgacttggtctttttttgtctggctgttcaattatttttctttatatttaaaattcagtaacataggatatggctttgtgagataatataaaggatcagattttccaactaagctctcaagaattagacctgcctccttattaataattcaaaggacatagtgactgcaagagacggggaaagcatgaagtcaaagtgtcagtgcagctcctcaagtcctttcctgccacactgggacactgttcccggctgagcagctgaggactccaggtgatgtgcgaagagtattgctttttttttttattattctctttccttccttccttccttccttctttctttctttctttctttctttcttttttatttagacagagcctcactttatcacccaagctggaatgcagtggtgtgatcttggctcactgcagccttgaccttccaggctcaaatgatcctcctgcctcagtctcccacatagctgggactacaggcgagcgctaccatgcctggctaatttttgtatttttttgtagagatggggttttgccatattggccaggctggtcttgaactcctgggctcaagtaatctttcctccttggcctcccaaagtgctggaattacaggcatgagccactgagcctggccttaaaatagggtattactttcaatcatgaaacagcacaaggtatatccaataattggcattttccttcattttgtttccactaggttcgaagtgaccatttctcttttccttcctttctccccagacatcctcagggtagagaggatgagggacagaccagcttctaacccttcattcctacctggtgttgatcattctgggtcagttttccttgacatagggtgtgctcttccaatatgtgggttgccgtggtcggaatgtttgtgtgactccaaaatgcatatgttgaaatctaatgtccaacgcaaagtattaagaagtgaggcctttggggggtgattagatcatgagggctctgccctcatgaatgatattaacacccttagagaatgagcttgagggagccctttttgcactttcaccacgtgaggacacatagaagcaaccatctatgaagaacaggccctcaccagacaatgactctgctggtgccttgatcttgcacttcccagccgtcagaactgtgagcaataaatttatgttgtttacaaattacccagtctaagatatttggttatagcacttcaaactgactaaacaacaggttcaagtcttcagttatttcaagaataatttctttaatgaaatattttcatattcgttctgtttcagtgtattcgctgtcctcaggaactccaagtatgcatgtttttaaaatctccatgcctgtcttctctacctctcactttatctttcatcattttatttaatgttttacaattttttttatttcaatagtttttggggaacaggtggtgtttggttacatgaataagttctttagtggtgatttctgagattttggtgcacccatcacctgagctgtgtacactgtacccaatgtgtagtcttgtatccctcaccaccacgtacccttccccctgagtccccaaagtccaatgtatcattctcatgcctttgcgtcctcatagtttagctcccatgtatgagtgagaacatatgatgtttggttttccattcctgaattacttcacttagaataatagtctccaattccatccaagttgctgtgaatgtcgttatttcgttcctttttatggctgagtagtatctcatggtgtgtgtgtatgtgtgtatatatatatacacacatacacacacacacacatatacacatatatacatatatgtgtatatatgtgtatgcatatgtctattttgtctatatatgtatacatatatacatatacatactttgtctatatatgtatacatatatacatacgtgtatatatatgtatatgtgtgtgtgtgtatatatatctgtatctatatctatatctatatatatagatatatatcacattttctttatccactagttgattgatgggcatttgggctgattccatgtttttgcaattgtaaattgtgctgctataagcatgcatgtacaagtatctttttcatgtcatgacttcttttcctttgggtaggtacctaatagtgggatttctggatcaaaccacagatctacttttagctctttaaggaatctccacactattttccttagtggttgtactagtttacattcccaccaacaatgtaaaactgttcccttttcaccacatccataccagcatctattatttttttattttatgattatgaccattcttgcaggagtgaggtggtattgcattgtggttttgattttcatttccctgataattagtgatgtggagcatttttccatatgcttgttggtcattcatatatcttcatttgagaattgtctattcatatccttagcccactttttgatgggattgcttgattttctctttctgatttgtttgagttctttgtagattctggatattagtactttatcaggtgtatatagtgtgaagattttctctcactctgtgggttgtctgttaactctgctggttcttttgctgtgcagaagctttttagtttaattaagtcccatctatttatttttgtttttgttgaatttgcttttgggttcttggtcatgaagtctttgtctaagtcaatgtctagaaaagtttttccaatgttatcttatagagtctttatggtttcaggtcttagatttaagtctttgatccatcttgagttgatttttgtataaggtaagagatgaggatccaacttcattcttctacatgtggcttgccaattatctcagcaccatttgttgaatagggtatcctttccccactttaagtttttgtttgctttgtcaaagatcagtatgctgtaagtatttggctttatttctgggttctctattctgttccattggtctatgtgcctatttttataccagtaccatgctgttttggtaactatggccttacattacagtttgaagtcaggtaatgtgatgcctccagatttattctttttccttattcttgctttgcttatgtgggctcctttttagttccatatgaattttagtattgttttttctacttctttgaagaatgatggtggtattttgattggaatttctttgtttctagattgcttttggcagtatgatcattttcacaatattgattctacccacccatgagcatgggatgtatttccatttgtttttgtcatctatgatttctttcagcagtgttttgtagttttccttgtagaggtctttcatgtccttggttaggtgtattcctaagtatttagttttttctttttgcacctcttgtgaaaggggttgagttcccgatttgattctcagcttggtcgctgttggtgtatagcagagctactgatttgtgtacattaattttgtatcttgaaacttggctgaattcctttacaagttctagaagctttttggatgagtcttgggttttcgaggtataccatcattatcagcagcaaacagcaacagtttgatttcctcttcaccaatttggatgccctttatttctttctcttgtctgattgctctggctaggacttccagtactgtgttgaatagatcttcaatcattttacattccctattgcaatttgactttgcttaatttttctaatttctagtatctatctgtttaccaagttttccctagtgcaattcttcctttgctcctgtcattttgatttccatttctatgatttattattcttttagctctttcctgagtgctgtcaacttgcttttcattttctccagtagtcttgctgtctgtgccctgagatcttgtgtttttgctttaagggctcttaatattgaattcaatcagaggtttaatattcaataagagatttcttggcagttgtgtctgtgagtatgtgtgaatatccttcctctaataattttcactactctttcctgtatttttttcttattatatcaatgctatgctggcttttgtttcaaattattcactatcacataagtcatattttccagctaattgaaagagcttgcttgagagaaggagagtcaactccatgaagatagattattcctatgttattgaattacctgggaagaattatcttcccaaatcaacctagcagggcatccaccctcagcctgcactgcgcatccttgttttgggatctgttggtctgtcctgaggttcatcctttgcactggaagcttctgagtgagccctccctccagaggcagagattgttttcgctcgggtctgctgccacctggccagctggcccttccttcaccaagcgtctctgctccacttccactctgcatggcctctgctcagtctcctttccatcctcccagatctagcagctcatgctgtgtgcatgggatgtggagttatcactttagggagtgagtctgccacctctagaagctgtgttgttgctgccgtgtcctgagccctgcctcctctgaacgtcctgctctgcacccccatgctagcaccaccacagttccccagttgtggctcttgagctggccccacctgtctgggctgtctcaacagttttgggtttgcctggatttcactgcatcttgagctggtaggggttatactgtgcaccaccccataggcacacacagagccaggcagtgtggtgaacaaaggcaaatgttcaatgaacactcatttcaaggtcttcactctaaatgagaagatcccatctatcccatgttgtcttagtctgctcaggctgccatagccaaacaccagagactgagcggctggaaccacaaaaatgtataatctcacatttgtggagacaggaagtccaagatcaaggttcggccaatttagtatctggggagggctcttttcctggcttgcaggtgaccaccttctcactgtgcactcacatggcctttcctggatgcatgtgcacagggagagagcgggagcaagctttctggcacctccttataagaacatgaatcctattagatcatctgacctcgtttggacttaatttcttccttagaggtcccatctccagatacagccacactgggggttaggacttcaacatatgaatttggggaacacaaacattggtttataacacatgtaaaccacaacttatggcaggaaatgatgtcatgagaagtagaattaaaatcaccaaggagggaatggaagagaagatgctccttcccgtcagattatgaaaagggtatcatttgaactgagatgagcaagatgggtaggctttgtgcatccggagatggggggatgctccaggtgcagaagccagtgcaagcacaagtgggcaaacataaggcactagactctgggctggagcggtggagaggtggggccagctcaagagccacaactggggacctgtggtggtgcgagcttgggggtgcagagcaggacgttcagaggaggcagggctcaagaaacggcagcaaggctactgggaaaaacaccctcaggagtgaggaagagcagatcattgccattgaagaagcccttggctcctgtggagagatctgagactttgcctcagcacagtcctcaaaggtatctgcatgggatggaagtggggtggcagcagctggcatggctggagctgtaccttagaaagggtaagcttgcaacacaatgtaaaatacattggacagtaaggccagatcaaaacattggcgtacaactgctaaaaaataacaatagccaaaaatcaagatgaatttttttttttgctatatgaaatctagatagtgtacatttaatttcatttaatttcagaagtagaaatctatagcaagatctctagtaaatgaaccttcaaatttatcattatgaagacaaaatttaaacatcttatattcaataattaccaattctaagcaaaattcagaatccatagagtaataatatataattgaaatacagtgtatatgagtcaggctacattgagctaatcttttgatctagtaattcaacagcataggaaaaggaatgaggcccacccaattttggcatgcattccaaattcaattaactttaaccgatatcttgacagcattctttcctttcttattaaaacaaaatctcttaaatgttcaagataaaatcagatgagtatcatgtgcacaagaagcagatcaagtttttcaagaatctttaaaaataatgtagattaaatcaatagaaatagaagcattaatttgaatattcagaacttttttaaaattattgtttgggtcacttgaaaaaaagggcaattttcttttccttattgaataaagcatttggataatattaagacatttaaagtaagccaccagagaagaaaaatttcaccatagttacgctcattgtaagtcaaagactttgaggtgatatacaaattatgctgatgttaatatacacacagacttaagaaaaagaaattttcccaccccaccaagtaattagcaggtcaaatctgtcctcttagagccaaaaagtgaaaatctaaatgaagtccttggtcaagaagtcttgactgaaaagctacctcctgtgtctccaatttaccccctacaaaaatatttatttctcttatctctttatcaaaagaaattcatctgggccaggtgcagtggcttaggcctgtaatcccagtactttgggaggacgaggcaggtggatcacctgaggtcaggagttcgagaccagcctgaccaacatggtgaaaccccatctctactaaaaatacaaaaaattagctgggcatggtggtgtgcgcctgtaatcccacctacttgggaagctgaggcaggagaatcacttgaaactgggaggtggaggttgaaatgagctgagatcacaccactgcactccagcatgggcaacaagagtgaaactccatctcaaaaaaaaaaaaaaaagaaaagaaattcatcttaaaggttttggatttagccatgacaaggcttacaccatccagtgtgtacttttcttcactttcttttagacataaaaaacaatgggaaacaacaatttctttctgcaaacacatggccccaaattgctcaatcatcaagcccttctacaaggaaagcctttgcacccattgctacaatgacctgccactggggcaaattttgtgtaaacatgtaaattttagtggttatcattttattaaaaaaagaagctcttgaatgttttttactactgattcttggcattctgtgtcttttgtgtatgtataatttaaaaatcactttgagcatttatgcacattactatatgacatgataattttcatgcaaaaaatcaaaatcaagttttagattaatttaaagggtatctgtaatatacactcagtttataaatgtgggtgatgtgaatgtaaagagacagacatgacctttcctgactctggttggtggcagatgtgtattttagtgtctgagctttccagccatgaacacaacattcctgatgatttccaaaaagcgcttaactcgaagatgtggaaattgcaatgaaggaatcagtccttctaacttgtagccagcaattatatatccaaaaagattggaactagggatcaaacctgaacaaagaaatagatatgcaatttgattaagattatgtttttcagattaggatgccataaacacaatgttatggataaatcaatgtgttaggtttttccaataaaaacaaatttagggccgggcgcggtggctcacgcctgtaatcccagcactttgggaggccgaggcgggtggatcatgaggtcaggagatcgagaccatcctggctaacaaggtgaaaccccgtctctactaaaaatacaaaaaaattagccgggcgcggtggcgggcgcctgtagtcccagctactcgggaggctgaggcaggagaatggcgtgaacccgggaagcggagcttgcagtgagccgagattgtgccactgcagtccgcagtccggcctgggcgacagagcgagactccgtctcaaaaaaaaaaaaaaaaaaaatttaggccagatgcggtggctcacacctgtgatcccagcactttgggaggccaaggccggtagatcacttgaggtcaggaatttgaggccagcttgaccaatgtggtgaaaccccatctctactaaaaatacaaacttagctgggcatggcggtgcatgcctgtaatcccagctacttgggagactgaggcaggagaatcgctcaaacccaagaggcagaggttgcagtgagccaagatcaaaccattgcactccagcctgggcaacaagagcaaaactctgtctcaaaaaaaaaaattaaatagggtttaataaacagatttattttgaatttttaattattgcaatccaaagaattatacaattataaaactgtaggttttctggaagattatcttgtccctcttgccatcctgcataaaaacaagccaaggttcagagagtttgctgccagcccggggccaggccagcagctgctggacgttctgacctcagtcccagactgtcagctcctttagaggggagtcatcttccgttccagccggtatcactgccctctggccccacagagttcacgggcatgaatttcttccatgcacatgctgaagaacagtggtctggcagagagccttgaactaggaactgggagatgtgagtgattattagaaaattgctcattaaagctcatagtgtgtttaacagattaatgttattttattttagatatttttattttagatttttaaaaccatcttattctagatgttttaaagcaagaaataaaaccggtattgaaacacatgacatcacataagtgctcttccagcatcttgatggtatttgagttctggatgtccagagccgcccccaacccccgctccccgcctcccttctgatgcctctcagggactcggccttcatgtgtccaaaggcaaattcctgcccttctatctcctcaagcctttgtcctcccctgttgcccctgctaaagctgttgccatctatccctttgcacaagagaaatacaggtatccctctctctcactttatcaaattcaacaccatgttctagctgttttttaattttccaaaataggtcttcatttctctaccaccctaaaccaagccactatcatcacattgcctggggcagtgcagtagccattgaccttcacacccatcaaatattgtccaaacagcagcctcgactcaaaatcagtcatgcactggtccacttgagccttccttggcctccttttggcccttagaataaggtgaccacccatcccagggacctcagggccagcatcacctgactcctgcctgcttgtccagcctcccccagacacccctctccccaccccacctgcaactccaccggactcatctctgcttctgaacagatccaactctcccctaccgcagggcctttgcgcaaacccttctctttgcctgtgatcctttacgcccctgtctccttccttgttcgtccctcccgcttcccctgacacatccccactcgggcagcacccccaccccgccagccccagtccaggctagatctcccgtctaagctcccacagcacagtagcagtgatgatttatttaaagctcctcttccctgctagagtgaatccccatgaggtcaaagaccggatcttttctgtcaaccactgtatcctcagttcctagcacaatcctgacatctttaatctctgcttcacatcatggcgggagaagccaaagggccccggagatatttgccagagaagcaattaggaaaatggcccagcccagagagctggagcagaaatgaagtccaaggaaaagaatgcaccgtccgtgatggggaaggaataataaccacagctcctgcacaggcagagcagctcggatgcctgtgtcataaggagcagagctgtcatggatgcatatactatgtgcggctctgtataaattcctctcaggtagatgacagcatctagcaaagaacattgcccacagtaggtgcaccatccgcctcgaccggtttgatttgactgtagactctgaaaggagcctcactgttcagctaggctgctggaagggactgaatgactccatcccttcatgacagaggctccttgtcttgaacttggaggaaaatgctctattgcatggttctgtcgtgtaaatcacttttaaaaattattcttccctctataaaagtatgcatattttggagcatgatctatctttatgcaagtggaggggtgaacggaatatttcatcaggataaccatttactgacaattcatgctattttatagtccatgtcttttggaatggatgggagtttgttattcagtggtttataaaatcttccagactgaatgatgagctcacatctgttacaattggtatggaaagtaaaactggcgtgagttgtccataaatatttattgtcaggaaatatcagtatgtacagctgtttttaggaaaataatgcctattttattattgatacataaagtgggacatttatgtttactacccataataacacaggtagtaataaaacaatattctgtaaagagtatcagagaggcagaaacaaagatgaaattttggtttctaaagcaagttttacaaaaacattatttaaagaccatactactattctcaatccctttcaaagtgttaaaaaactttaagtcagtcaagaattggcaactaattttcagaatcaataatatgatcataatttctgccatagaaaatggctttgctgtcaaagaccatcttgagaacaggcagtatatccatgctgaattcaacagttcttacctcctaatgtgagccttggtcatctggaaagaaacaggctccttactgagttccatatcgtcccttcctgctccccaaaaggcttttttgagggaaaactttccgcaacaggtcactttaaaactacataaatatgtatatgtggtatgtaagtgtatggatgtttatgtacatgtgtgtatgtatatgcatatgtgtatttatgtgtgtgtttatgtgtacacgtgtagatgtatgtgcatatatgtaggtgtgtatttgtatatggatatgtatgtgactgtggatgtgtgcttgcatatgtgtagatatgtgtatatgtgtttgtgtatctgtatatatgtatatgtacatatgtgaatgtgtgtatgtgcgtgtgtgtgtgtgtgtcttccctcaaagaccatctgattatttttcccatgcagcagatagtacatgagtagtttgcacctaacttttaaaagtcttatgcgtatggttggtggctgtcggaacgaaagtgatttttcaggacaatgtcaggctgcagaatcaagggccctgaggagagaaatggcaggcaaatgctggggtcgcatttgctttggtgttccttgcaggtcaaaaagacagcaagctcttgcctttcactttgcaaaatctgaacaacgttttggaaacctggtccccactgctcttacagaagggaaagggacccctcaccaggaagagccagtttcccaaccccagaagccggggaccctcagccctcccagcagccttcgccgccacgtttgtccccacaggccgcacacacggccatgctcacctcctcctgcggaggctgcccaggcccctcacagcccgcaggatctgggtcacacctgagccagctctggggacacttcgaggctctgcatttcttacatgtttcttttcaatcctgaccttctcttagatcaccccaaagggacaccccgagccctgaccatttacacagatagtcttttaacacttggaatggaagcatttgagcaaagaacaccagaaacagaacaccagccagtctcctgccagatggatgacattattttccactcatttaacagagaaaaataattgaacgaggaaccggggtacatgtgttgctctgagtgtggcgtgcgcagttgggaaacctcagaacggtgtggcccgaccgtggccatgctgagggttttgtggtctggaggttcctggagattttcaggatctcacattcagaatcccacattttcagaaacaccacagaagaagctatttatttggctttgttgttttcttaaaaattaaggaaatgatttggagagactaggcctccgggttcttgcttttcttttccccacagaatttagacattattcaaacatttattctgtatcatctttttagtttgtttttcaaaaaagacatttatcttgtgataatggctagttgcagaagctcagtgagattctcaggttttcttaattgcaatttcgtctcatgcgcttgaaatgccaagcactaatggtgtttgaagtggggctggcgtctgattcaccttcagagttatcttgagctttcagccacaagaattttaaacctgacagtggtaaagaaatgcccttctttcctgattgctccgtgtgcgtggtattctgtaaccgaggtcattaaaggtagacgtcacagtggcaagagcccgacaggcctgtctcctggtgtgccacctccatactttgggacttacctgttacagtttcttggccttgatttcctcatctgaaaaacaggagaataagctctgttaagcaggatcagtacaaggattagattcacttattaacattctcctacatttgaaattctaaatgagcacaaaagagtttcgcgactgtcatacctttgaatgggaactaataaaactaaaaatcccatgttgccaagtttataatgctgattcattttatgcatcactttgcctgaagtttcagcataaaatgtgctctcgattatctaagaaaaataatgcatagagaactttttatgaccaaatactcgtctataccactcaacacttttgaatggctttcccaattaccttcccggaatatacagggaccataaattagttctacagaatatctaaaataactacaatttagggggtatgtgtgtagcaaaacatcatggaatgcactctaaagagaaatacatgtgaattcagattgcatgttcttcaggagggacttattcagatgcggcccttccttagtgcaattaactgtgaactgccacagtgagatcagaaggtcgtgcccagcaaaggtgaaacacagtgataaaagcagtccctccatcagcgaggacaggctcaaggtcagccagttgccattgagatgctagactgtggcatgcagatgggagcctggaactggtcgctggaaaccacaccaacaaatttggaattccgtgcactgatatctaccccacatgagcagaaactgagtttggccgtggaccgactgaaccctgcgccagttcccatgtgtcaggactcgctggtgtgcagagtatttgctgcggctttgatctcattgttttagtttactggctctcctgatttggcattaaatgcgttagaacctaatcagttccaagatggctttcacgatgcggttccttttcctaactatttccaaatcaattcacttagggacattataggttaagagtagttgttgttctcatatgaatcttgagtcagtttttcttttgtaaataacttcattctttttcattgacctcctcaatatttatttctaaatatttttaattttttaaaatacttaagatttcatttgaaatagaattaaatgaaagttaaggaagccttatcatgaatccagttctgcaatgtcattctattaatagctgcagtctaaataccagtcccagccatcacagcatgtccatcgggtaaatcctcactacgtgtggcgcatgttgtcctccccagccctgtactagtccaggagggagttattctgctccctgctttacctatgaggaaatgaagaccgggagtggggacagggggagctggtgccagggcagggacagagcttgtgccccccaccttgaccacagcaccactcagtcctcttctgttttttttttctttttcttttttattttattttattttgaggtggagtttcactcttgttgcccaggctggagtgcagtggtgccatctcggctcaccgcaacctccgcctcccaggttcaagtgattctcctgcctcagcctcccgagtagctgggattacaggcatgcaccaccacacttggctaattttgtatttttagtagagactgggttggtcagtttataatgaccacgttagtcagtctggtctcgaactcctgacctcagatgatctgcccacttcggcctcccagagtgctgggattacaggcatgagccaccacgcccggcctcagtcctcttccagttacccactaccctacccagaagtcacggccaatccccaccctgtgccaactccaaattcacttaattatcatacgcacatgtgcgcatgcacgcgcgcgcgcgcacacacacacacacacacacacacacacacacacacacacacacagcaatcactgagtgaccatcttaatggggattgggttacattcataacctattttgtaggagagaattttccaagggaccaaaaacgttgaccagacccaaatctaaaaagtattgctgcccctgcgcctgtgaaaatgcaagggactgagccaatgggaagaaggtggggagaaggggctgagcgccccgcagcctgcccccacccctggacctgcggctgcctccacttactcctgggaacctgggcaaaccacttcacttctccaagcctccattgcctcaactttcagtaaggatgctaatcatagcacctgcctcacagttgagttactaagattagatgaaataatgcatttaggcacagttcagctcctggcactagaaaatattcaacggtgttagcactgtcgctattactgtgtcatgactcaatgggagagcacttaagctagtgccttccacacaatggtcacttaaaaatgtccttagttaaatgaaatcggatgcgcatgagttcagcgtgaggtccgggtcagggagaggaaggggcattggcgggtagggttgcgtcggtggggcctcctctctgcctctgactggcctctttgcccctctgctttcctggtcaaaggttcgtaagcaaacggtttctcccactcctcggaacatggacttcctttctggaaggcactggcctggccatttacctcaaatgccggtgttcctggcttcagtgcccggctgcccagcggcctctccctgagtctgggttctcaggtttctgctccgcctctagatgacccctctgcccgccagagctggcctgcgggtcaccctgcaagatgaccctctgcctgcccgagctggcctgcgggtcaccctgcaagatgtcccctctgcccgccagagctggcctgcgggtcaccctgcaagatgacccctctgcccgccagagctggcctgcgggtcaccctgcaagatgaccctctgcccgccagagctggcctgcgggtcaccctgcaagatgacccctctgcccgccagagctggcctgcgggtcaccctgcaagatgaccctctgcctgcccgagctggcctgcgggtcaccctgcaagatgacccctctgcccgcccgagctggcctgcggggcatctgcagcccacggggccagagacccggatgcaactatgggcccgccccgtttcctcaggcagctagatttctcttcatattccttttccaacaaacgtctcttgaacatcgactgagttgatagacaccacggagcctaattcttgtaaatgagatattttcacagtaacttcagaacgtggtatttgtcaagggcctctagagaagcaccaacattgctagcgcttaaaagaaagacaaatgtcttccgactctggtgattcagagatcaaggcaccttcacagattttcataagcagagctggggaaggaactccagcaggaagaaatgactcaaggccagatgaggaggtggggaggccctgactcttgtctgggggtaacaatcgtggtttaactggatcctgatgttgctgtgagggaggattagaagacaattggcctgaagcccatcacgtagggcttaatgccaggccaggggagctgaaatttattcaacagataatggtacatttctgaaggttttccccagtggagaaatgcaacacgagctgagctaacgaaggtttaagtaggcagtggaaaagggtgaatttaaagggatagagagaaggcaggagagggcggtggggaggttattccaacaggaaggtaaatttggagacagaccataagggacaacgtgcggtggtggcaacagaaacagaaaggaagaccgacctcgacagtcgaggggctgggggataggatgggcttaagccagctcctcctgcactttcacaagtggcaagacccaactcttttggtagcgtaatccagtgtcttaccatttttcatggaaccacatttgcactaaaatgaagcataagaaattcagaatggaggaggaattgttatgggaaactatcactgggcccatggctttttgttttgtatttttgagatggagtcttgctctgtcacccaggctggagtgcaatggcacgatctcggctcactgcaacctccacctctgggttcaagcaattctcctgcctcggcctcctgagtagctgggattacaggcatctgccaccacgcccagctaatttatgtattatttatttatttatttatttatttattagtagagatagggtttcaccatgttaacaggctggtctcaaactcctgacctcaggtgatccaccctccttggcctcccagagtgctgggattacaggtgtgagccaccatgcccagtccccaatggttgttttaaatggcacacaatttgaaaacatctaaatttcctgaccatttggctaaccttaatactctttaataatattaagtaatctaaaccagattagttcaaagttctgtttctttcgatttctttaaaaagattttcctccattccttgtgcgttgctattacagaagacgattgttaccttctgatcaatgagcaggcgatctcacaaacttgcaaggatttttttcaaagatagaaatagatacagattgatcccgaatgtaaaaatcaagcatagtgctaatatttagacattttcccagtgtatccagggattatttgagtcaccagaaaagatttttcgtgacttttctttattcttaacatgaaaagtttagcagcaagtcaagtttctggaaaatcctatgaaccatcttgttctttggagagcttaacgacacctaggtcatcaacaacaatcaacaatgaactattgatttcagctgtaatgatcgaatagcagtgccttaaatccttcctggcagggatggcagcattgcatgcacatgtatatgtgcacgtgccagagtaagccagtgtgtgggcaccaaagttacctctgtggtttggaacatccagaggcccaaagccagcccttagctccgtgcaggtaaaaagggtaagaaagtgcaacagttaaagcaatacaacggagtgaagcctcctgtgcttatttctaagtaatcaaagcagctgtataaccacaaggcagctgtcccaggccgactgctgaccgtgtagctgacagttacatcatgaactaagggaatgtgatttttagaaatttcacttattacctacctacccatagttcatgagatgaaaaagttttgtaactaaaatatgtaacttccacataaagaatcggggaattaagaggacatataacaacaagataaacatacataatgaaggtccacgttaccattagagaaagtgaacataaatactgaaatattaaagtaaggtatacagggaatataggtttacagtgttgtgatttttaagtagaatttttaatcatttttggaaactaaacaaaaatccagaagaaagcatatgtttttctcatcataaatataaaaaaaaactgtgaaaagaaaatggcaatactaaccacattttgatacattctcataaagtctagtaacaataacttctagcactttaaagttttctagttccgacctagattttatttttgccaagatacaacctagcctgatagctccaatagcaattacagaatatgacccaattatttctttaccccccaaaaaaattaacatttttttggttaggaaacagaagatattttaatgaaaatgatctaaaacaaaaaatgcaattgtggtaaaatagatgaggaaattgtacttctttgtattaaaatatttttcataaaacattaaaaatatattaatgagaatttaatctcatataagaaagttaatatgctataatattgctttatgtatgtttatacgaaattgcagggaagtaaaacaaattatgtcatcataatattattttgtatcccctacagaaatatttttctaaaaccactaaaaaagcatattacagacttagtgaggaggctacctgtaaacaaattattttcatggagaagcaaggaaaattactaaaaacaaaatttacatttaaaatgtagtcaataaaggtcaggtggtcaatgttggtctcagttttccccaaatgtaaaatggcagcccaaggaaaagagaaccgttggacaaaatttgaaaggaaagacatatttttaaggatcagttaggaacaactttttattttcttttatagtaaattttctgacagccatatccttgcatttaaattctaccaatcacagtgactcaaaattataatttgtaattataattgttaattgcttaatgaataattaatttcacagataacttgaaagctatagatggatgatagattagctagataataatagagaattttaagattagaaggaaaacagttttcatctgaataatatgtccattataaagaaatgttttaagtggtattttttatttcactttgttttcatatatatcacaactgaatttctcagccagagcatctataaagacatttcattattttgcatatggtggtttccctttgatgtttggtggttgaacttaacctttctgtaccatgggctcctcctctgtaaaaatgtgagcagtaacattatcaactttccaaggttgttgtggggattaatgagaattcaaattaaataagctaaatgtatttaaatgcttagcatagtgcctgacacacagtaagaattaaaatttaggtcaaaccacatgaaattgacattttttagccaaaaatagttgaatattggcaacgttatctggttcattataaagcagtattcacttttataattattctaggctacgtgcctatttttaaaaacgtaaatgcatacaaaagaaaaaatgacacggaccaaaaagtatttaaaaccaagtaatccacagattagggggagctcctgtcctaaagtgattacaagggcgaccataaggaatttctgtgttaattggcttggccacaccgacactgagtgcccttagcaaggaagcagactgtaagggaaacagccgaggcttcagctttaggttgacctgagatcaaatcccactttgacaatttgcttatccgtacagtgggtagatttggaatattaatgaatgcaccatgaactccttgaattgatcttattacggaagtgaaagaaagtaacattttttagcaccccataattgtcaagcttttggctaggtgctgtctataaattagttcatttaattgttagaactatcatgtaagaagcactgatactgttattataataatgattataattacagcaaactctgctgcaggacttactagtagatagcagctgctttgcatatataccctatttaaccttcacagccacacgctaacatagatccctgggaggaatattcgagagtttttcccatcttcttcagcatcatggccaacctcatagaattaaggattaaatgaaggagcatacataaaactcctagcctgatgcctgacaccttgcttcccacagggccaattcagggtccttgtcccatgccctgaggccctgagtagccctggccttctgctatcagaagggcttccttagtaaaccccacgcagttctaagctctataacccagagcagcaggaggctgtcttcataccgcagcccctggggggtgttaggagactcgtggaaacccattttactttattcttcaggaaatataggcccccaaagtctatttcttgccaaaagctctaatttgctatcttatagtggtcaggtttttggggtagaatagtagaactaattaaaaagggagtccattgtgttccttcaagcaggaaacaatcataacaggacttaaaggaatttagtattttgagtaattttcttcaccttcaggcattttttttttgagacggaatctcgccctgtcgcccaggccaggctggagtgcagtagcacaatctcggctcactgcaaactccacctcccgagttcaagcagttctctgcctcagcctcccgagtagctgggattacaggcacccgccaccacgcccggctaatttttgtatttttagtagagacggggtttcaccatcttggccaggctggtcttgaacttctgactgagtgatccactcacctcggcctccaaaagtgctggtggaattacaggcgtgagccactgcgcccagcccaccatcagactttttacatggagaatgtttgggggcccagtgatgtagttctttatgggattcataaagggtttcctgacagacacactactcgagtaatgactgtagcacgcagagatatgtgcagcccagccatttatttcactcattttaatgtactttgctctttcagacagggcaataattagacctgccagtagcttttcgatatgagaaaaaccactttaaatgctccacactgatttctgtaaacagcttgctttttcttaatttataatgttatctcttctaacaggccataactacataaagggacatgaaaaaagtaaaagaaataccagataatttcgaacttaagatcacatgtactgaactatctatccaaaccattattttaccttaacttgaatagctgtcaattgtcgatctgattttgcaatagctcactgcctatcagaaattccaaatctttttgtaatgtttgtttttaactttcaaacctgctctcaatgtaatatctttcttcctgcgacgaagctttgtttctttagttaaattgaaataagactatgtaaagactttgtctccctattattcactaaagagggtgaacaaaatcaccagacctcaaaacaaaattgacaccctggtgcttactggtgcttaaagggaatgtcagcacacccactgaaatacttcttcagtggaggtcacggttcaggttgctggcatggttttataaggaggctcgtgttgcagctgtctgcactgtccctagcctgaagataaatagcagacttcagtttccactgctactggtcttttaaccttcaataagaacaaatacttctgccttagcttcatctgcctccaagttcatctcccaggacctagtgagctatctcttatctatctccttcccagccttcagcttgggcttcctagagctcaagagcatcccagcccactctcatctttagaggctccccatacattaaaaaatgtagaaatgccaacacaagttcaaatcaattgcaatatatcatgaatgtttacattgaacaaattcacacttttcacatacaaaccaaaataacaatgactttatgtgtagcctcattgagacttaatccaacttaagacactttgtaaacctgagcgctgcacccagaagtgtgagttcttgcctctgattagcgacccctcacagccacctgatgggtgggtgggtgtgcagtcataaggatgtaaagcaagctttttagaaacctaattcactgtaaatgtccctccttctgtatatgaccatcaattcagcttctcacaatgatggactgaccgtgcagtgtcctctgcattgcttaacacaatccctccaattcttcggtgcccaaggtggtggcccgggatacctgggcacctttagaagtgatagtgactcttcatcacatctctctgctctctgaaatagtgcttattgcatcgaccaaaaagaagtgaatgctggagtggcttgtgcatgccaaaaaatctaacttctgagatcttctggtctactccctagcttcccagggtgataagatgagactttgttttctttataacctctacccagtagacaaataggccaaagataagaacaaatcactctcacaaaggaaaaaaaaaaaagcccacacagcaaaataatacatgggaaaaggttaaccctccttagtaattagaaaaatgctaactaaagcaaccttagagtagcattttatagacgctggattggcaaacacaattttacttctaacacccaatgctgtgataaagcaggcacccgtatgtgttgctggaacatcatacactggcctaacctttctgaacaatcaatgtggcagcctataccagtaaccacaaaatgttcatattctttgaagcagtaacctcacttttgagaattctttcaaggaaataatacaactaaggaaaaagactttatgcacaaagatgttgattgcatcactcacaaaaattgtgcaaatctggaggtagacttaatgtctctagccaaagaagaacagctgagtaacttgtattccttccactccatagctattaaacagccatgacaaatgataattaggtagagtagatatcaatgttgaaaatcccagatgccataactcagtgaaatcatcctctccggtaacaacgcattccaacctcaaggtctttgcctttgctgttctgcactgcacgttcttctcaagcttatttctttctcccaagccgacttctccacactaagatgtcagcttaaatttaattttcccagggagatcttctggatcatcgtgcctgtagtggccccccaagtccatctctaccacatcacctttccgttccttgccaggacttctcactctgaagtactcttatttaatggttggttacctggcatattaccggactcctctgccagaatgtgagccccctagtctacattcccactctagtccaataatctatcctcagctgctgaagctctagaacacagctggtcttcttgaaatcacagaatttggatgatgacatctgagttcatattagaagctggttcctgagtcccaccttggatttattgccttgttcttttatcctccgactgggaagccagtttacaaacagacactgatctaagcaccaggcaggccatgtggccaaatgaagagagctgtatttcaccaaggcgaatgctccagctgttgctctgggggtccttcccaccacccaagccccatagacgtgtcaggaaccatcagcctgacctgcccgccctgccctgcagccagagcctacctgtgatgaggagagtggaggacggagttggcgtcctcgaggccaggaaggttgcctgtccctcagcacttcctctgccagactaccttgactccccaaattcccaccactggagctgctcctttgagccaaaggtgtctgtaaaaactaaacataggccgggcacggtgctcgtgcctgtaatcccagcactttgggaagccgaggtgggtggatcctgaggtcaggagttcgagactagcctggccaacatagtgaaaccccgtctctactaaaaatacaaaaattagctgggcatgggggcgcgtgcctgtagtcccagctactcaggaggctgagccaggagaatcgcttgaaccagggaggcagaggttgcagtgagctgagatggcaccactacactccagcctgggcaacagagggagactccgtctcaaaaaacaaacaaacaaacaaaaatatatagcctagactgaggacccaccatcacatggcaagtctttaagtccagggtcttgctgatagaagcacgtagggggcacagagctcccagtacagatatttccaagaggctggaactaagtggaatgacctatccggaggccttgggcaggtgaaggacaacagaactctgggaggtaacactggggtgaagccagaaaatcagttgagccctttacccaggtctccatcaacctctggaggtttacattgtccagacctaagatggcaggcgccagacttagtggaagcttggtgagtgagcctgcttaccagagcatttgcctcagtttactcggcgctctcagtctactctgcagatgacgttgaatttggaagcctggtccagggcaggagctctgatgtctaccccatcccaaagggcctaggaccatggcgctgaagagtctggaagaggacggagggtttctttgggctcagaggccaacgtagcaatctatgcagagaaggtggcggtagatgcggggattttcgcctcagtagagaagcggagggagtctcctcgaagcctccgccctcactctcttcctgcagggaaagatgtgagccagaatgctgccaatgcctcttactatctcctgcttaaccgggctgtctcctcgtggccagcaacgggcaaggagatagtctctctgtcaattcagctacttatctgacataaattggaattataacacatgtattaagtgcctttagtgcctcaaaacacaaaatcaggaaaccggaatataaattattttgcaaatattaaatcccatagtgatactacaaaagaatgacctttttgtggcttaaagcacaagtatcaggtgtgcatttgaaaataaaatctgcttcctcccatgagtttagtagggccacgtccactgcttcctctcgtgagtttagtagggccacgtccactgcttcccatgagtttagcagggccacatccactgcttcccatgagtttagtagggccacatccactgcttcccgtgagtttagtagggccacgtccgctgcttcccgtgagtttagtagggccacgtccgctgcttcccgtgagtttagtagggccacgtcagctgctgcccgtgagtttagtagggccacgtccgctgcttcccgtgagtttagtagggccacgtctgctgcttcccgtgagtttagtagggccacatccgctgcttcctgttggcttatcagggctgcatgtctcacagtcagccagcagtctagggaatgggccagtcatgagctgtgctcctaaatttggaaaaatcaggaccttgtggagacaaaaaggaagtaaacagagctaccatccttcagatgaccacgtctgggtgccatttgcagaagaagagccagtcttttccccattcagttaagcaccaacatattgaactatatctgaaggaaaacggaacgattaagtgtaagcttaagctataaattgtttgctcataaagtcctacgaccaagtatcttaatcagagatgtaagcagggtgcaaggtaccagtctagactaaaaaaactcataaagggacatcccaaagatgagggctccaagttcaaggtgagtccagataacaatgtcctgctgtccctcatggcctgaggatgaagcagttgctctttaaaagtgttgctcctttgtgaggttgtagagtaaactcattttattaaacagtaaagcaaaaaacactccatggcgttctgtggggctatacttcctgtcctctcccagaggacagttaaatgatggccagtctactcttatctgggagctacagtatagacaaaatagcagctgcagtaataatagttgtcgaaatttatcaacagcacgttaaattaatataaacataatgcatattctcttatttttgtcctggaacctgtccttacagatggatattatttcccctgtttcagtggagctgggatgcatggccatttgtgttcaacaagagcacgcctccgcccctcaggggtcctgttgtttcatttccaagctgcctttgtccagactaatcttaatgtcctgattcaggggaaagccatcgggtacactaaactgaggaattttaagagataaaaatgtaactcggacaaataaacattctttattcaaaagtatcaaaagtcagcatatttcacctatcaacatttccaacaagcttcagtgtctattgtgcaaacccaattttgctgctgtggcaaattaaatggccacattcaaaacttccccccacagtttagatactgttctctctctctctcttttttttgtttgtttttttttgtttttttttttgtaagatgtggccaaaactttgattgggctttaaagccttaaacatttgtaaaaatatcaggcaagctcaagcattttcagactgtgtcctgcattaatacacttggggcaaagtggatgtctcttgccacatttaactcaccagtgtagaagctgataaaggctgatagccagagcttggaaagatatttctaggttatttttaactaagacagttgtaaaaggcgtgatggatttaactccgtcactttcagagcagctaactgagttcagccagcagactgctttgatttgttcattaaatgtattatgtttgcattacttgagttcatttgatgagatattcccactctgtaaaatatccagctaaggatttggaaatctattcaaattttgcatccattaattcattttagaattttcaaagagtaggtactttaggcaagctaagatatatcccaaatattcggggaaacatccaatctacagaaatggtgtaacgtgttttttcatcgtaagcacgattggtgagtttatccatttaattatttttcttgctagaacaagcagtacatcaaggccatgagaatcttttactttgtagctctgtgccccgctgtgcagcccagtcacctacaatgattcagccttatcttgttatgatggtgagcactgggatggctatgcaaaggcttctaagttctgagttcatcattttagaaatgcgtttccccatagtttaatgtgtttgctgataacatttattagaaatctgagatgagcagggtgagggggccaagcctgtaatcccagcactttgggagaccgaggtgggtggatgacttaagtcgagacgttcgagatcagcctgggcaacatggcaaaaccccatctctacaaagataaaaaaattaaccaggcgtggtagtgcgtggtcccagctactcgggaggctgaggcaggagaattgttggagcccaggatgccgggattgcagtgagctgagatcgtgccactgcactctagcctgggtgacagcgtgagaccctgtctcacaaaaaagaaaaaaagacatctgagatgaatttttatttttgtgcctcaatcacagaaaaaaaaatcagagctgaaaacaggttgtatctggcatcattaacattacctagaaatggagaagtctgatagcagctgccaggctggctcatttttaaaagttttcaccaccagtgtagaggtggttacaattatttccagtaggttttatcactcctgagggcagccatcagtagttcttttccaatcaaaatcatctattttgctgtttcgcgagctggttgaaaatcaccatgtagctatgaaataaaccatacaaaacaaaacttagatattaaatgaaagcactataaaaatccgatatgttcttcttcttggagcaaaagctgctaaaaagtaaatgggaccaggtgcagtggctcatgcctgtaatcccagcactttggggggctgagacggggggatcacctgaggtcagggattggagaccagcctggccaacatggtgaaaccccatctctattaaagaaaaaaaatacaaaaattagccaggcatggtggcgggcgcctgtaatctcagctacgcaggaggctgaggcaggagaatcacttgaacagggaaggtggaggttgcagcgagccgagattgagccatcacactccagcctgggtgacagagcaagactccatttcaaaaaaaaaaaaaaaaaaaaaaagtaaatgggataatctcatttttcactatgaacaaaaagttttttttcttctcaaatttaaagatgatccaggtaaaccccactttaagttgaggagtacatgattgaaaagcagccagatgaagctacctagctgtagagaccctccacatattgaagctcatttgatcgaacatttccaaattcatgtaagtgctatttccatggataacaactcacaaatatgtaaatagtaaacaaagaattggaattaggcacatggtggccactacacctaccatacactttatttagaactgagtttgcttatatcagtatctggatccagtaaacccacaaggtagcaatttacttatactttcattcattcagtttacaagtgcccaatttgaatttgatgcccacgatgaggtttataacataattaccatgatcctttccccccacgaggtggtagaatgcaaaagggctaagtaaacaggaaacatctattaagggttttagagtaacctggaaataagcagggaggggactacaggcctagtgctccaggaattcaaaagaaagaaagatgatgtggatgcaaaatcaaagagggagtaacattagccctgaaccaaagtaagcttgaacttaccaggaggaagaggagagcatattcccatggggaatttaggcatgaatgaaaatttcatgcagtggggtcagtaggaaatccagcctgagtgaagcaggaggtcccactgtggaggagaatgcaagtgaccggcttcgtgagggagatgagatcacacaggggccagacgactggggttttgaatcggatccattatagaacatggagacactgattattaaccagaaaagaaatgatgagataaattgttctgcagggtaaatcaggaagaggaggctttgaagatggaaagataaacagactattaactatgatccaggaggaactggagtgggaggcctggccccaccgtgtcccacacagcagcaactgcacaaagaaaggagggccaagggcagcatttcatcttccgagcccacactcggtgcctgtgctcctcacaggagccttctgcacttaccagggggccatctgagggcctccacaccacattcaattccagcaagaactgttggagaactgcaagaaccctttcctgaaggaaacccagagactctcctactcttcgtagagaatgggaaccttcaactttgattcctaaactttcccaacataagtgacttcaatgtggctttctggtttgtttcttaagaccattcaaatacttggaaggttcctcctttttaccttctcactctattcctgcgatcccacagttataggttctcctcgtgcctctggtccaataccaggcgtccgtccactaagtagcaatgacgtccctgggcagtcacgctcagcctgctcgtctatcttgtattcatgaaagccttataatttcctcatctagaagactatgtaactaatatctaccagactaaaaataaatcataataaatgcccataaagatgggggtatgaaatgtgaaattgatcctagactttgcccatactgaccatgtgtttatggcactgagagaaaagtccttgaaatcagtcggccttgatttttgtcatcctgcctgtatctctgtgagtgatactattttaaggacctgtaatgaagtaaagatagtgtaatagtctatgtcataaaaagtgatattttttatcatagcaattgactatcctaggaaacactacccggttggttgcagtggctacagtatctccccatcacttactcacctggaacctctctgctgatgatacggggctaaagttcttctgtaggtagcaaatgttctgctacctcctgctctcgctgtgatgacatgtgatgcttggacctctctttctgaaccttcccgccatcattcttgcacttcagcagattcttactttgatttctctttttcaggatcccagtatcacttactgcttacatcatttcactacattttctcacctctcaaaacctcaattttctcccctgtgaaggggaataataatagtatttagctcatagggctattcttagttttaaatgacctaatctttgtaaatgacattatattgttgttattattactccaccatgagataagacagcgagaaatagatttaacacagacagctggacttaactctctgctctttttttgaagcactctgttccccgaatcatgttggccaataagaaaagagatgagcttttacttcacaagcttgaattcagcttaattcaatgataactgaatctattgttataattatccagtagagggataaattgatgaacccacctatttttcttagtataactttcaggtcaaaacagtaattaatcagagaagaccttagcttgcctttttgtagtcttgaccaaatcattgtcaattggtatgtaaaaaagaaattaacccatataattggtctttaaaaagctatatagacttactgaaatagcagaatgtaatagcatttgatgtagggtgtcaacaaataatatgaattttgcacagtgctctcttaactagaattaattatataaacatttggtcttttcaggttttcttagaacttgacttgacacctgattttgatgcttatgaggtttctgacttactttgaagaattacatagttgctttgtgatcatcttttcagttgaaatacaggcatccattgaataactgtcatttctaaatgcttattccaaagttacattgtgatattataaaaagtaatattaggtgaatagaaaccagagagcatccaaagttcagtctttattcagaggcagtaactgagattcagagaagttaaataacctgcccatagttaaatagctagtgagttattgaatagtatagctactaagttattgaaaattatatctcaggctatttgccttgaagtccagtattcttttcactatatcagtatgatcccattgttagtgttgtacatttcatagataaatgaatctactttgcagttggacaacgacaattgtttagaaattgtcattgtctatgtgagggaaatttagatattgaattgactcttaggccaagattcatgatctcttcaggtgaccaatggccccattcagaagatgaaaacgtttcctcaagcttttggaaatatgatggcttagtaacctagtgctttagtgacccagccttcggtgtcaagaagagagaaagagaacgagacatccagctgggaatcgagtgcttacttcaaagcttttatcttcagaggaaagaaatcttgtgaatttcattaatgtcaacaagatctgagaagatttgaagtgggtaagcccttgggcatctctagcgtgccagatgccgtggttattgtaagttttggttgaaaaaccattgcaactttgattcacacacccatgaaccaagactttggaaatatccattgtaaggttgtatttaagggaatgtagggaaccttcggtttccaagagaacatgaagtcagccaaggaagcagtggctaagcatggcccagacacagaaacacccaggattccaaatggggaaacacacattatggttaagggggagaaaagttgagtcccctcaaagttacatagcaaagctaaaaaaatagagtgaaagaagcatttctttaggattctaaaagcagataacttcacggcttctccccaaaaggctcttctcttactcattgtttaaaaagaaaaaaaatgaatttggtcctaggttttcccctgcctctttcttttctttctcactccttcacctccagaaaagaccagattggaattcatagctgtttccctataattatctaaactttactggagaaaactcttattctaaaacaggtaacactatttctatatagtaaattcagtccaagctaacccaaacaaacacatttctggcaaaacaaatggtgacaatttaatctaggtattgaaactgtaaatatcttaaaagataaaatatacctgtagctttccttttcccctttcttaattcatattaaaaaaactcaaaagcaaccatttctaaattcgcaaacattatgagttattgttaatgactttttttagcaatatgttatctgttgaataaatttcttttgaaaatttttagctttatttcactaaaattgacatttctgcttaaaaaacaaggagtaaatacaaacaaggagtttctgttttggtcatctcaatcttttaactactaaatccaataaacacaaaggaaaaatttggctgggtgtggtggctcacgcctgtgatcccagcactttgggaggccaaggcgagcggatcacttgaggccaggagttcgagaccagcctggtcaacatggcaaaactctgtctctactaaaaatacaaaaattagctgggcatcgtgatgcacacctgtaatcccagctactcaggaggctgaggcaggagaatcgtttgaacctgggaggcagaggctgtagtgagccaaggttgcaccactacacttcagcttggaccacagagtgaggctccgtctcaaaaaaaaaaaaaaggaaaatttattcagaatcatccaacagagaatctgtgatggcttagtgtcgtcaagaaacatgataataataaatgcagtgagttccacctgcacaaacctgccaagacctgagccaggccgccagggctcgctttctctctcaccacagcggatgacatcactgcaacccaatcagaagaaagccagctttagctgtgactgatgacgtcaaaggttacaggtcttaataggtgaaaatccttttacttgggccttaaagctcttgaaattttttagttcagcatttgagaatcaaaaatatgccttttctggtccagaaagaaactatttgatttcttctgtcagcattttttttttaaattccactcagtgttgcttcagcgagattacctggccccagtggggaacacatggcaaggcgatttctgcagtcggcttgattccgacaaatgctgggtacggaaagagcttggatctggcctgagttcactcaagcgccatgtgtgcaaagtggctacgcctggcagcaaatgctccacatgccaacggccagagcacagccctagaccgatggcggtgcggctgaaccacgaggcctccgcagctatttatttcagagccttggttttatggctgtcattcagccttgggtgcgtggagagagtcagtctgcctgagtcaatgtctcatgctctctgcggctaaggtgaatgttgttctatcagtataatcgtcatgtatttgtctgagatagttgctaatttctacagtcagttctacagtctagctattgtgtacctaggaagtaacacaaaccattgttgttactgagcctggcaagttgcatcataaaattcaagcttccgaaagcaggtatttagtgtgaagaaagactggtaatgatagttttatcatcatctcagtcacctcttaaccatttcctgattcactcaggtggtttttaatggagtttcccaagttagtgtttcctgggagaatgtttggttcgttgccttctaacagcctccagctcttcaggcatctcaggcaggagagcgtgttggggccgggactctcctcccgtggacctgacaactctgccttccccggtgtggtctcgctgttccctttgagagtgcgatgctgccgcttcagccaggacgttctcaaaattagcagaagggcttccttcctgaaatcgtgcctatttaggattttcttagtcattacgaaaaagtatagatagagttcataaatgacttcatctattcggtatcaaatgaacaacacttcaggcatgttgaatgagcaatctaaaggaaacatttatttgtttaatttttccagtgccttcaataaggctttcatttccaaataactcctttgtgtattgctgttcatacaatggctatatatttaccatttaacagtattgccccaaagcgtaagagtgagaaaaatccaaatttgaattaaattctccctgagcctcgcagtggccgtcacacgttcccctcctgcttttcgcgtctctaggatctccgagtgtcttgactacaacaaaccgttcagagttctcaagacgcagggctcggtggcaagcaaagcgccacgggggacacacagcgcgtggaggctctggaagcagtggggtgcgtgggcccagacatacttccatggaggagaaagtgaccactgtatgctacaggaagcgtggctaattaggcttcctcagctggatggcaagctcccgggggtcttttttgtctcgcattgccctatagcgcggagtagatgcttagtctacagggaggacagcctgtgaaacagctgcagctgctgccacgacccacggcgttctgcaggacggaggagcaacgcgtcagcacacgtcccgggagtgacgtgggaagacctcgctctggccaccaaaccgtccttcctttctgtctttgcttccttcaccttcgattttttcctttctcctgtaatagtcataactaaagaacgtagaagaaagaatgaagtttgcacacagtctagaattgaaatggagaatacatcatcagaatcctaggtcatccaagcctcttgctggtccgtgtccacggagtggcagatatctttgtgaaatgtaaatgtgtcaggtgcagctccccattgcggtggccctcggtgacaagatatacggctgtcccttcacagccccaagctgagttcacgcagcccggaggatgctatcgctggacaagagaccagagaccgggatagacacgtgcgtcctagttctgaacaaaatggtatccggaaagagaaagcatcccatggggacagtttaaggaggtttagatagaaaaatgagtgtgcatattattcatgcttaaactgcttacatcatcaaaaacaccaatattcagaggaataaatgcacttaaaataattcttaaccaagaacaactttgaggcagtaggtcacatgcctcctgcatggagggatctccaagaacagaaactaaatccctcgttctcctctgcctgcctctcatctttccagaagcaccaggtctggcttaaaccattgctttcattctatttgtttgattataaataaaatatatcttttccatcatcaatgtatattttctagctcccagacataaaatccactccttgctttctaaattgaagtgtcattttcctaatcagaattgacaattgtaaataaccatttgggtttattcgttttaatgtcctattctcacaaacgtatttttcacgtgtcgcatgtatttaaaatggtgagttcaaacttaatcatctcaatttcaggccctcaaaaaactgtcaatgtagcaggtttgaaatggagacctcatgattcacctgcttctcaacatagttagaccccaaaccgtgcagggtcattgtttcagcatgaaaagtaaaggaggtgttccttttttggtcttttttctaccccaatgatacgcattctgcaaccacaaatattccaactccaactcactttttgaataagcaactcctattgtgttttgttcttttatcatttgaggttatacactgtggaaaaacaaaaaaagctacatagtttacttactcctatggtcaaattttttttaaaagtaagaacatgagataaagttctgcttgtcattgctgccttctggggcagtggaaaagcaggtgccttaagctttccattgtgtgcagatcttccacgccctttccctccatcaggaaaatatgtctgtctcctggtctattcagctcttgaccttctgactcatatgccgacaaaaggcaccatttatgagtgactaatgtatgtatctttgtccataaggaacttgatcacagcagccacaactcagcatcatcatcaactatcttttccgtgtgccctccaggggtttatgcaatgggctctgtcctatgcaaacaggccatgccaccttctccctaggtccacctctttcatgcctaggaggagtttatcagctataatttggggagaaggggcacacaaagatgagcccaactctgaggggacatttgtccctgctttggttggaatcctggaaagctgaagttgtttctaaaaagcacattctctgctgctgacctcccctgtcacgcagggtcctcccaccagcacctctgttcaaatcccctgttgcttttcatcctgcccaccttcttccttaacatcttttctttacacctgtagcaaatgtcaacaacgcctcctcccaacacgagcttcctcctcctctctcaatccaactcaaagtccttcgtggaaggctccccacaagcggagccaccgggcttcatctcccccgtgcagccattcctgcctgcaccttctcacgcctccgaacaccatgtcaatcttaagaaatataaacagaaaaaccggtggacttcaaatgcatatccatttacatgtttgtttttacaaagtgtatcgttgttttcctcaaaaacaatagggcaaggacccttttgtttcaaaatcttatctcttgtttatctgatatattctttttgttttgtttgtttgtttttgagacagggtcttactctttgcccaggctggagtgcagtggcgcgatcatggctcgttgcaacctcgaccacctgggctcaagtgatcctcccacctcagcctctcaagtagctgagattataggtacatgccaccacacctagctaattttttaatttcttttatagagatggggtcttgctgttgttgctcaggctggtctcaaactcctggtctcaagccatcctcccacatcagcctcccaaagtgctggtattacaggcatgagtcactgtatccagcatctctctctctctctctctctgttcctctctctcattcgtgtgtgtatatatatatacatatatatatataacattttgaatatttgggatgatcaaactttaaataaattgaaattcagctttacctgtgacagcacaaacacatgtactatgaggaacgaaaaacccacctaatcacaatggctttgtgaaccattttaaggtcatttattatgaataaatgacatgcactacagttgtgtgactcacaatctttttttttctgaaaattagtaatatatctgcctgccttcaccctcaccaaaagaaaagaataaggatagaaatttattgtgtgtatatcacagaagacagtgatatttctctaataagtttctggaaaaatcaagcaaaagaactgcttccctgtgctgtgtaggattgtaattgttatatttattctggtctgaaccattactaagtcttttttaaatgtctcgaatgactaattaaggataaaaggttggaaacaccatttttccctctattattttcacattcaaacaagataaacattgtgggtctacacttgaaatatgaataaaatgaattctttctctggtgaaatgcacattttcaagttgcactgaaggtccctggccccatggcactctctaggcctgagctgtcaccctcatcctactgggtcctcccagcccacctgtgtactttccttccaccatagataaggcaggacacactcatgacttgcttgctgggagaataaatgtcgttgaagcccttggtaacctaggagtggaatacaacagaaagcgtggaatgactatcgttagagaaaacaattgtggaatatctacacgcagaatggaaactaaggggccccatttttgtcagactccctcacccttggtaactcctgcagcttggatacaatcgcatatctctttccttagtgatttgagattgagtctgtggtgtagaggagaggctcttagccataggttcctggcctttgaaggccaccctaggaattgcttccctcgtagcatcagaggcagctgaagcggtcacttccagactctgcagctgacacacctccccggacttggggactccaaaactagcagtggcacaaactccctgcaaagccctgactgacaaatagctgtcatcccagcattgagtgatagttcgggagcagccagggcaggagaagcagcttcctcctgtcccacctgcacctggaatgagcaaaatgatttcaaggaactgaacacttggattactgggattcaggagaaagagtttgccatgtgttcaaaagcagcagagatgcgggtgggggctaagcctcattccaaagcagatccattttaaatcacacggaacgaacagcctgatctcacaatagactgttccttctaagtacaccgtgctgtgattttggaaaactcagggcccaagagaacactctgtatataatagatcaagaaagagagtccccgacttgtcatctttcttgtaactgtgattcacttacttttgtttactctgttattcctttattttaggttatttttcatcggctccaatctgggacttggtatttttgtacagttgccactgcttttaaaactccgcaagatcgtgtaaaaatcttgcatgtttgtgtctcctaataagcattcagagaaaatgcctagactgtgtaggacttttcgggaaattgcagagaagtaactggcctctttgtgtgtttgcatgcaccagtgaactccggagacggcattgactacagccagcagaagagggagaacattggggacttgatccaggagacactggaggccttcgagcgctacggaggagaaaatgcctttatcaacattaagtacgtggtcccaacctacgagtcttgcttgctaaactaacagtggcagcagctgggacttgaaacctcccgttggtgttgggatcatctgtctctgttgcttttagcatctcattccttgtgacttccacagctttcttttctacagctgctaaaatagtggcttatgggccattggactgttagccctattgagagcaaggctttccaatacataaatagtgtctgtttcttagattacaatagtgtactgtgcttatttgttctaagagaagaattgcttctttatacagctccgacagaagcaggagtccgagttaaaccttcagttgtatagacaataaactataattttcatatgcaattcagcaattgctgttctgtgtgtgcctgccctgggggtgatgtcagaggttgtaagggaagagtttatgctgactgcttactaggtgtttgtcatggaagagaagcatgggttcagcagtgcctctctagcagctgtgcggaataatgtgctttgacattcaataaaactgttgaatctatattccaattacagcaggaaatttttccagcccattataacctcagctacagttgtaattaatgcctctagcctactagtgatctgggcttcaggggcttttcagtttatatttgggtgcaggtaggggaaaactagggagaggatggggtcagggttacgtgtgaaacgtaacttggcaaatatgtttaaaaaaaaaaaacaagggctagcttgaatccttgtctctccaccgtatggcacactgcatctcaggacctggtgtgttattgacaaaagtgttatctggcagtttgtttagggcttttaattatttttgaaaatgacttatatgtatcttaatgattactccttgaaacagatcaaaattcttccttggcaactcttcttccttgcttcctcccactagttggatgacttctcatagcacgcagtgggtctgatggccatttttggggattttattgagaccaaaaaggaaaaaaaaaaaaagacaaaagacatgcactttttcattcaattgaaaaagaaaaaagtgcccaaagggaagagcaactgtaagatagccccagatcgtggctcttcaggcacgtcagatgggagcttcaggcatttgaaacttagcccagaaaacttcataaagatggaacactgactttgcacacctgagagatgctgtaactgcttagaaatacatagccgaaagtatctcgttcctgtagcaaagtgcaacttctgcataaaatgaagaaatgaggccaggtgcagtggctcacgcctataatcccagcactttgggaggccaagaggggtggatcaggagttcgagaccagcctgaccaatatgatgaaaccccgattgtactaaaaatacaaaaattagccaggcatggcatcatgcgcctgtaatcccagctacttgggaggctgagacaggagaattgcttgaacctgggaggcggaggttgcagtgagccgagatcgtgccattgcactccagcttgggcaacaagagcgaaactccatctcaaaaaaaaaaaaaaaagaagtggagaagtggaatgtgtttctccatgcactaagcgtcagcctccaaactgttttcactatctaaggcataagtttctaaaggcaaacaccaattttgaaaatgagctcatcgttcatttccccttattactgtctcagcatgtgcaatctagcatctaaagagctaccgtcctgtttctgtaagcattttctacggtgaagggagaggcgtgattggataagacaaactgactttgttttttgttttttgagatggagttttgctcttgttgcccaggctggagtacaatggcgtgatctcagctcaccatgacctctgcctcctgggttcaagcgattcttctgcctcagcctcccaagtagctgggattacaggtgtgcgccaccatgcctggctaattttgtatttttagtaaagacagggtttctccatgttggttaggctggtctt

SEQ ID NO: 426 - DNA, 100314 bp, Homo sapiens
  source 1..100314: mol_type = genomic DNA
gccaaggctggagtatcacttgagcccaggagtttgagaccagcctgggcaacatagagaccttgtctctactaaaaataaaataaaataaatgatcacagcatggtggcatgcacctgtagtctcagctactcaggaggttgaggcaggagaattgcctgagcctaggagttcaaggctgcagagagccatgactgggccattgcacaccagcctgggccacagagtgagatcctgtctcgagataaataaaaaaataagacttgagcacacatttcaacaaagaggattcgggcatggcaaataagcaccctaataaggttgaacatcactagccagtagagaaatacagaataccactatgatgagatgccacacacctgttagaacaaccgaaataaaaacatcgacaacaccaagtgctggtgaagatgtggggcaactggtgagaatgcataatggcacagccacatcacaaaacagttcatgacagtttcccatagagttacacatacagctaagttccccagagaaatgaaaacgtatgttcacacagagagctgcaaatgaatccttttagcagctctattcacaaccacctgaaactggccacagtccagctccttccacaggctggggtccatccccagcccgcaatactgcccatcactgaaacgtcccctccgaggcctgcagcagcctgagtggccctagggcatccgcccggtaaccaccaaggccaagggcagcagcaatcggattctaagtaccagacattgctgaaaacaaaactgcaggcacagagagtgacagtgaggggcagcttgaggggccttctgggctccccaggctctcttcaaccctccctgtgctggctgccctggcccacgcgtgtgtcgaggaagtccacgcacgccacgggggtccacaggcgcgcgaagaaggtctacattctcgccaaggggatccacactcgcgcccagacggcgcagaaccgcgcgccccgacagagcgtgcggtaccgaggcgctggtcccggccgcgccgtcaccgcctccagcccgcctaagccgcaccgagaaatccgcgcagcgccagcccgcgggactcaccgtccagggacacgaactggcccacggccgaggagccgccgccgctgctctccacgaactgcacctcggacacgatgatgttgtcctccagcactgagccgcaggcggtgcacaccgcgtccccgcgcgccgcgtccagctcgatgtccgtgccgccgcaaccgcggcacacgcggcccgtcatgccggcgaccgcgcgggcagcgcccggagcctcccaagactctcaagccacccgagcctccggagcagcccgcgccgcccgcccaggcccagccgcccaggcctcgccgctctcgcgaggccccgctccagccgattcgcagccgcagattcgccgcgcgcgcccgggccgcgccgcccgcaacggccgcgcccgcgggatgggacaggcaccgggaccacggcggggacgcgaggactggagccgcgacctccccactgcgagcgagctggcctcccttgcggcgcgccggcgtcggaggggcgacctgcgggggctgggcttcggcggaacccgagcggggcctaccggtgagcgcagccgaggactggcgcttgggggcggggccacggcggtgagcgcagcccgggactggagtttggggcggggcctcgtcggtgggcgacaccggggactagagctaagggtggggcctcgcggtgagtgcagccggggacgggacccaaggctggcgacgggacccaaggctggcgacgcgacctaaggcagtgggcgggcccttggcgatgaacgcagtcggggactaaagctggacgcggggcagaggagggtcctcctcggatagtgagcgcggtctccagcggcgagcgaggcctggggtgaggactcagccggatgcggggctgagggtggggggcggggcctcccgtggagagacggcctgcgaagggaactggagctgtgggcgggggaagggggcggagcctgggtctggacccgaactgtgggcggggcttgaggcgagggggccgagcgtggtgggcggggccttggctcctgagggcgacctgggacccaaccccgggctctgggagtggtgggcggggccagggcagctgcgctggggggcctggccgcagaggtggagacacccgccaggggccaccctgccccgccctccgcatttgcggcgtccgccgctccgctcgcccaggttccagagcctccccgtgcgccccgctattctccgttttctgttcccctaaaattcccactttctagcagtcattcgtggccacctgtggttacccgtgagtcacctcgctgtgccccctgcccagagcgggaaccctggctgcgcacgccctcaaatatctgcaggtgctgttcacaatcgccatagggccggtgacatacccaggaatgagcctaaaaagaaatgcgtaaccaggcgtagtggctcacgcttgtaatcccagcactttgggaggccaaggcaggcggatcacgtaaggtgaggagttcgagaccagcctggccaacatggcgaaaccccgtctccactaaaaatacaaaaaaattagccaggcttggtggtgggcgcctgtaatcccagctactcgcgagtctgagacaggagaaccacttgaacctgagaggtggaggttgcagtgagctgagatcccgccattgcactccagcctgggtgacgggtgacaagagtgaaactctgtctcaaaaaaaaaaaagagaaaaaaggaaatgcggaagaccccaccctcttttttttctttcttttttttttttttttgagacggagtctctgctctgttgcccaggctggagtgcagtggtgagatatcggctcactgcaacctctgcctcctgggtttaagcgattctcctctctcagcctcccgagtagctgggattacaggtatgcaccaccacacctggctaattttgtatttttagtagagacggggtttctccatgttggtcaggccagtcttgaactcccgacctcaggtgatccgcccacttcagcctcccaaagtgctgggattacaggcatgagccaccgtgcatggccctatttcattaatttctgctctcatttttgttagatccttctttccacttaatttggttcaatgtgttccctttttctagtttcttcattttttaaaaattgagatagtgtctcattctgtcacccaaggtggagtgcagtagcataatcaagcctcactgcagactctacctcctgggctcaggtgatcctcccacctcagcctcccgagtagctggaactacaggcatgtgccaccacacccagataatattttttgtagagatgggtttttgcctcatttgcccaggctggtctggaactcctgggctcaagtgagccacccgccttgtcttcccaaagtgctgggattacaggcatgagccactgctccccgccctgtcctcccaaagtgctgggattacaggcatgagccactgctccccgccctttctctagttcttttttttttttgagatagagaacacccaggctggagttcagtggtgccatctcagctcactgcaacttccacctcccaggttcaagtgattctgtcacttcagcctcccaagtagctggaattacaggcatgtgccaccacgcccagctaatttttgtatttttagtagagatggggtttcaccatgttggctaggctggtcccaaactcctgacctcaagtgatccacctgtcttggtctcccaaagtgttgagattctacacgtgagccaatgcacccggcccctttttctagtttttgttttgttttgttttttgaggtggagtctcgctctgtcacccaggctggaatgcagtggtgcgatcttggctcactgtaacctccacctcccgggttcatgccattctcctgcctcagcctcccaagtagctgggactacaggtgcccaccaccatgcctggctaattttttgtatttttagtagagacagggtttcactgtgttagccaggatggtcttgatctcctgacctcgtgatccacctgtctcgccctcccaaagtgctgggactatgggcgtgagccatcgcgcctggccttttcctagttttttaaggtgaaagatgaaatcattgatttaagatctcttttcctttataaataggcattttattgctataattctccctgtaattaccactttagctgaatcctgcacatttcaatgtgctgtgttttcattttcattcagctcaagattgtctccactcttaatttcctcccggatccaagggttattaggaagtgtattgttttgtttctaaatgttggggatttttcaaatatgtattattgatctctatgcaaaatgctctctgtccatgatgacatttcatccttatggcaacactagcttgcagacactgttgtctccattttatggagggagcccttgaggatgtgaggggtgacagccccaaatctcatagccagtaggtaacaaagccagaatccaatctgaggccatgtggccactggatccttgctctcacctgacagactagaggggttatttcgtgtgctccctcaccaaagcctgtgaggtgcctgcaggtgcaaggggcagcatgcctcccaggccacagcggtgcaggacagtcaggcagtacaggacagtcaggctgtacaggacaggattggccagaggagcagagggtggggaagaccacacccacaacggtaagaggtttaaagggtgtggtttcagccaggctcggtggctcaggactgtaatcccagcactttgggaggctgaggagggcagatcacgaggtcaagagatcaagaccgtcctggccaacatggtgaaacccatctttccaaaaaatacaaaaattagcaggtgtgatggtgggcgcctgtagttccagctactcgggaggctgaggcaggagaattgcttgaacctgggaggcgggagttgtggtgaggcgagatggcgtcattgcacttcagcctggacgacaagagtgaaactccatctcacaataaataaaataaaataaaataaaatataaaaaagggtgaggctctactgggcaatggcccaaggtgcgtgctgccagaactaagcctttgctcagatgggctgcagaggaggggtgctatggtctgaatgtgcattgtatcagtctgttttcacactgctgataaagacatacgtgagactgggcgattaacaaacaaaagaggtttattggacctgtagttccacgtggctgcagaggcctcacaatcatggaggaaggcaaggaggagcaagtcacgtcttacgtggatggcagcagggagagagagagcttctgcagggaaactccctcttataaaaccgtcagatctcgtgagacttattcgcaatcacaagaacagcacgggaaagacctgcccccatgattcaattccctcccaccaggtccctccacaatatgtgggaattcaagatgagatctgggtgggtacacagagccaaatcatatcatgtgtgttcccccaaagtccatatgttgacgtccttgccccaaggcgatggttttagagaggtggggcctttgggagatgaggtcatgagggctgcttccctcatgagcgggattaatgccctcagaaaagtggctggctgggcacagtggctcacatctgtgatctcagcactttgggaggctgaggagggaggattgcttgagtccaggagtttgagaccagcctaagcaacatggcaaaaccctgactctacaaaaactacaaaaacttagccggttgtggtagcatgtgtctgtagtcccagctacttgggaggctgaggtaggaggattgcttgagcccagaaagttgaggctgcagtgagctgagatcacaccactccactccagcctgggcgacagattgagaacctgtctcaaagaaaaaagaaacaagaaaaaagaaaaaacgtggctggagggagcttgtctgctgcttcccccatgtgaggatgcaggaagagggcactgtctatgaaccaggaagtggccctcaccagacacggcatctgccagcaccgtcctgtgaaatgaatagtggtttataagccacttggactgtggtggtttgccattgcagtgtgaaccaactgaggcagggagtaacgctccccacgtgatgtgaaggcataaagaatggagccaggttagagggagaatgcggagaactgccctggggaccggttaggtgccccatgctgcaagcgccccaggaagcttggaaacatttaggactgactgacaagctcaaagagtcaagcaagggcggccaaggggcaccagtgccctcagagcacccacactgggcacccagcaccagcttcctgtgcccagggtcctctgtactcctcattcagccctgcaaggcaggaccctcactcgcaccgcgccaaagaggacgctggaaacgtgcagtgatctccgctctggctgtaaacagggagaggctgtgggcttgcccctagacctgactccagcacacagcagcagagcggggcccaggctgggggtgtggggcaggaacattccttcatgggggccccagagagctggaaagtaatgtaggtgttgcactgaaatgagagaattgctttaatctgaactgaacgtgctcgtaacacttagaccaggaaggatttccttttctcagggcctgagaaaaatgacctgaccagcagggttagagttttgaaggacacgcctaggcacctgcaaacttcccctcctggaggctttcttcattcatggtgtcttttgtttttgggtttgttttgttttgttttgttttgttttgtttttgagacacagtcttgctctgtcccccaggctggagtgcagcggcgccatctcgactcagtgcaacctctgcctcccaggttcaagcgattctcctgcctcagcctcccgattagctgggattacaggtgcatgccaccatgcccggctaattttttgtatttttagtagagatggggtttcaccatgttggccaggatggcctcgatctcctgacctcgtgatctgcccacctcaacctcccaaagtgctgggattataggcatgagccaccacacctggcctgttttttgggggttttttttgagactgagtctcgctgtgtcgcccaggctgtagtgcaatggcacgatcttgatgtaccgcaatctctacctcccgggttcaagcaattctcctgcctcagcctcccaagtagctaggattacaggcacctgccactgcgcccagctaatttttgtatttttagtagagtcagggttccatcatgttggccaggctcgtcttgaattcctgacctcaaatgatccatctgccttggcctcccaaagtgctgggattacaggcgtgagccaccgtgccaagccccatcgtgttctcatctgtggtgctttgacatcttggggtctcgtggacctagagagggactcccctcccagggttagctaattcctagagacagctgaccacttgcctctgagtatgccttatttactttattttttctttttttcttttttttttgaggcagggtctcactctgtcacccaggctggagtgcagtggtatgatcatagctcactgtcgtctcaaactgctgggctcaagagatcctttggccccagcctcccaaagtactgagatcccaggcttgagccaccgtgcaggctgagcatacctttgatatgcagagcaaccatcatgagtcccacctgcctcctttcatcaggctcctgcattcctgaacactagccccctgccctaaatcaccccaaggccaggtaccagctagctagataccacccccaagcccagagcccactgaaatgacccagttctaattctgctcagcttgcctcctctgccttgcctggaaaatggcaataaaggctcttgcccaccctttcccttcaccccctccctgtcctgactggccctgggtgcttccccacgtgcccctcctcctgggaactgtgagtaataaactcctctttcaaaggcggttgtctctgtgtctgtcatcttatcacatttgatcaaaataactcctgggtactcaatagccctgtccccccatgcagcagtcagcaggggaaatgagaaagcaagcttctatggccttctcaccttctcacctgctgcctggccttgggcaagtgcttcaatctctctaggtttctacttcctcatctgcataacagggataagaatagcccaccctagcactgcggagtatgatggaggacatgtgtctggtagacagactgctcagaaggcaagtccctgttcctgtctgttctccgcaactcgagtgagacttggtgaggctccagtccaccttccaccacagaagtcaagggccaggccaggacagtggctcacgcctgtcatcccagcactttgggaggcagaggtgggaggatagcttgagcccaggagttcgagaccagcctgggcaacaaagtgagatccctgtctctacaaaaaatttaaaaattagctgtgcgtggtggtgcgtgcctctagttcagctacttgggaggctgaggcaggagaatcgcttgaacccaggtgactgaggctgcagtgagttatgatcacaccacagcactccagcctggaccatagagtgagactctgtcccccccaaaaaaacaattaggccgggcacagtggctcacacctgttatcccagcactttgggaggctgaggtgagaggattgattgagcccaggtgtttgagaccagcctgggaaatatggcaaaacagcatctctaacaaaaatacaaaaattagccaggtgtggtggtacatgcctgtggtcccagctactcgggaggctgaagagggaggattgcctgagcccaggagacagaagttgcagtgagctgagatggcaccattgtactccagcctgggcacgacagaggcagattctgtctttttttttttttttttttgagatggagtcttgctctgtcgtccgggctggagtgcagtggtgcaatcttggctcactgcaacctccgcctcctgggttcaagtgattctcctgcctcagccttctgagtagctgggattacaggtatgagccactgtgcccagctaagttttgcagttttagtagagacagggtttcaccatgttggccaggctggtctggaactcctgacttcatgatccgcctgcctcagccccccaaagtgctgggattacaggcatgagccactgtgcccagccatgactttgtctctaaataaataaataattttttaaaacccttagggacccagcacagtggttcacacttgtaatcccagcactttgagaggctgaggcaggaggatggtttgagtccaggagatctggcctacagtgagccatgatggcaccactgcactccagcctggttgacagagcaagaccctgtcaagaaaacaaaagaaaaaaaaagaaaaagacaaacaaaacctaacaaaaccagaaatccatcctgcacgaagagcactgaggttgagtgttggttgacacgtgttgcggtaattgctgttctgatgtctgtgaatgtccttggctgatttctgtattagggcctgggtgttttcctttcttttctaatatttaagttatgtcctggcttattgtgatgatattctattgtgggaaagaaagaagtgttaaaatttatgcatcaaggtccctcttaatcttggggctcaggataaccacagtcaagaggggagagttttattcctgaatccaggtcatgctgtgttcaactttacaccctgatttgtcacacaatcacatatctgagaatttccccatgttgctaaaactgaggcagcgttccgttttgctggttattccacatcccatggggtggatgtgccagggcaagttttgtcatttcccctggactggacattcctttctgtaggtgttgctgtttgaaatatctcacacacctggacctgtgtccctgttgacatttccagtgtcacctgcaggatgccatgggatacccatgagcccaggcaaatctcccaagacgctgccaagccactctgcagagctgctctgggtcctgccccaggtgctgtgtgagggagctgcgctgcctgcgcccaacccaggaggggagcagcgtgcaggacaccgaggatgtcatcacgaccttaggtctgtattaggtctagattagcctgcattaaggagaaggtggtgatgtgtgtcttttttttttttttttttttttttttttagacggagtctcactctcttgcccaggcaggagtgcagtggcacaatctcggctcactgcaagctccgcctcctggattcaagcaattctcctgtctcagcctcccgactagctgggactacaggcgcccgccaccacacccgactaatttttgtatttttagtagagacggggtttcagtgtattggtcaggctagttttgaactcctgacctggagatccacccgcctcggcctcccaaagtgctgggattacaggtatgagccaccgcacccagccatgtgcatctttttataatttacaattcgtgatagtagtgacaactgtctcacttattcttttgtgaatcttttgtagcttctctaaccattttccactgggaattttttagtggtcttatggacttgtatgatttcctttgatattaagaatgttaccctagtgagccaggcacagtggctcacgcctgtaatcccagcactttgggaggtcgaggcgggcggatcatgaggtcaggagatcaagaccatcctggctaacacggtgaaaccccgtctctaataaaaatacaaaaaattagccaggcgtggtggcaggcgcctgtagtcccccctactcaggaggctgaggcaggagaatggcatgaacccgggaggcagagcttgcagtgagctgagatggcaccactgcactccagcctgggcgacagacagagcgagactctgtctcaaaaaaaaaaaaaaaaaaaaaagaatgttaccctagtgaaacattcagtattcttacaaagatcatcctcaatagtttgttgcgttgggtgagggttccctttgcacgtttggttttttcaggacggggcgcagccccagccagatggcgcccggctctccagccagcggcagctcaccctgctgtggtttgattttccctacacaattaatacatgttcatcatggagaaaataggagataaagataagcaaaaaggagaaaccaaatcaatggaatccccatcacacagagatactttcttaacactttggattaatttgtatcctatcaatatttttctatacctgaaaataggtgttttatatgtataatcactaacatgtaaatacatactgcacatggacatgcattttcacatacatttttgttttcttgagacagagtttcactcttgtcacccaggctggagtgcagtggcacaatcttggctcaatggaacctctgcctgctgggttcaagcgattctcctgcctcagcctcccgagtagctgggattacaggcgcgcaccatcatgccccactaattttttgtatttttagtagagatggggtttcactatgttggccaggatggtcacaaactcctgacctcaggtgatccacccacttcggcctcccaaagtgctaagattacaggcatgagccactgtgcccggcctttttatttttattttttgagatggagcctggctctgtcccccagactggagtgcagtggtgtgatcctggttcactgcaacctccacctcctgggttcaagtgattctcccacctcagcttcccaagtcactgggatcacagatgcgcaccaccatgcccaggtacgtttttgtatttttgttagagatgggactttgccatattgcccaagctggtcttgaactcctgaggtcacgggatctgtgcgctttggcctcccaaagtgctgggattacaggtgtgagcccctgcgactggcctgtttttagctacttttaactcactatttctgccagctgtagaatattctatcaggttctatcatggctcacctaaccctgttctactctacaaccccggggttgattccaggcctcactctcagcagttgagctgctctaagggtgaccgtgggaactgtccacaggtgcggctgcgggtgcagcgatctcagcggtcttagagctcttggccatcccccacatggcttcccagaaaatgcctccaggaggagggccctgctgtaccttttttgtgaccattcctcctcagcctcagtcatggccatgtgctccaaccatgggagtggatgcggcagggcctgtctaggggttcggcagttctgtccctctgccatagcatgggctgggcagggacctggccacgtggggctgcttcctcagcccagctcctggcaggagaaggagtaggggcgctgtgggctggagccgccaactgaccagtgctggccctggaggaggcccctcccccactccccgacttcagcagggcctgctgtgtgtctgtgtcatcttagcccaggctgaggagatgaatgcgtttccaagcagcccatggtcctggcgcccgactggaaaagcctgagccttcaccctaggtggagggacctagcgaagccaggcggacagaggaaaggcctcggcccatcctgtcccatgactgggggttggggcttcgtctttttaataccaatggaatcctagccaagcattcagaaccttgaagctttaacttcttaaataataataactcccacaacctccggggaccccgggcagcacgtggtaggaccagctttcaggttgtcctcctgagaccccagggctctgaaggatcctcttcttggacctcctccccaaccgtgcccagccaccccagtcatccgagaggtttgtctcaaaccaagttcctgctttaaagaaaacgctaccagagaaagcacctgtgctccaaacacgggggtgagggctcacaccatgccagggtcatagcatggggagggatgcctcccagccttcaggggatctcctcctgtgacccacagccctcaagagaaggaccagcacagcatcattttccgacagaggagggcagtgcaaataacaagttctggctaaaaagttactctgatcacccaagggacatctgtgcacttggaaaatacagaagaccacagtcccatcaccaccatcccaccttaaaaacaaacataaacgtggtcgcaggcgtgacacatggtgtgtttcgtgtccctgctttcctgcctggcagaagcattgatgtagacccaccatacgggttcttcgggccactctggtacagactgtgtgggtcatatcccgacccctggcagctgcataacctcacaggccgccatctcctcttttgtcacttgggatgggacagaactgtcacgtcccttaagggctcacaacggtgcctggcacagaggaggggcaccgctcaatggtggcagctggtgccaagccctgctgtgcacggcttagtcaccccgcatctcctcacttgacccccagttgtagtccctgcctgggttagacgctggcatacacaggcaccatgtgtcaggcggcccatccgtctgactgcaactgcacgctcgccaggtccagcagcgccgtacgctcagttctggggtcaatgggtgcctgtctcctgccctcccatcacagacagcctgtcctcctggggtatggctaccccctctctggacatagtcacttctccccctaccctgtctcaaaggtatgagatccaccggccctctgcccgccgagcagctggccaaggtcagacagaccctcatggctctcagtgtaccaccttagaggagccaggggcgcgtgggaaacacagagtcccttgttctctccgaagtgggaccctgactttaagcagtcgcagctgtttgcagttctagatacaggagttacagctggaggctgagctctctcaacggaggaagcagcggcatgagggcctttgcagaaggagctgacggggcactggggtggcaagccccgtgggccaggaaagaaaccagctccaggtcaatttgctcgggctggatttgtttcagtaaaactacttgtagacaagacacagggcgaagagaaaagcaactgtaaactaactgtgaaacaaggaaacagaagagaggccagaaaaccgtttcctaaatctcggcttggcatctggtgctggaccacagccgctgccaaacagatgggggaagcaccctccctgagccccagagcctacacgtcgggccccagcggctctagccattgcctcctctttgcttgggtccccaagttcactgttaaccccagggccaggagccagccttggccccagacatttgttctccattgtcctgagcacaacgctgaaaagcggcgctgaataaggatgctgggacgcaaagagggcgcccggggtcatctggagccctggaggctaagctcggcagcctggcgccccgagtggcttcgagtccccgcgaccgccgccaggcccggccacctccttgccacctccctgcgtcccggggaacccacgcaggggggcgcgagggaggggctcggggacgggcggggcccgcacagccgggccaacccagcgggggtcggcaggagacaaggggcggcgagggcaggggggcggggagactcggggcatggcggggtggaggcgggaaagtgtcgaggccggggaatccgcgcgtggggaggtgggcatcgccagggcgacgatgagctttccttagggggcggcgcctgaagctggccgggacccggtggacccccacgactctcccggcccttgcccgcggctcccggggggcggggcggggcgccccgggcggggtctgtgcgcaggcgcgtgagtgcgcgctctcgcgcaccggcgggcggggacgccccgtgaggcgccgccggaggaagcgcgcgcgcacctcacttccggcgcgcgctgcgccggcggcgattggacccgaggcggcgagctggcgccccgcccagccaatcggcggcgccggcgcgggtcggagggcgccgggcgcgcgcggggcggccgggggcgcgcggggcgcgggcggggcgccgggcggggcggggcggagcggccgcagctcgtcgccgcccgcgggcctgtccgacgccggggcccggcccgtcccctccgccgcccggcagccatgtgaccgcgccgccgccctccgcgcgcccggcccgcccgccgcgcgtccgcggcccggccgcagccccaggccgccgagggagcggcggggccggcgccatggccgagcgaggccgcctcggcctccccggcgcgcccggcgcgctcaacacgcccgtgcccatgaacctgttcgccacctgggaggtggacggctccagccccagctgcgtgcccaggtacgcgccgcccgccgcgctttgttcccgccgggcacctgctgggggtgtcctggccgcggcctctgcgcgccccatccccggcccgggtcccccagcggagcccaggtcgccccccgcgcccccgcccgccggttcgacgcgtgcagccgccgcccccccgcagctccggcaagcgcggccccagccccccaggtcccgagcaccgggggccgcgctcagcttccgaggacccggtgctgctcagacccggcgggaccttggggctcccgggcggcgctcacctggctcgccgcaaccgcacctgcacacctgcctcaatgcggtgccggccggggtgacgagggtgcttcctctctcgggtaccacacgcttcctttcgcgttcggcgacactgtcagacctcggcctgggagcgacccccggcgcacggggcgcgcaggactcggttgtatcctccgtccagcgcgcggtggagatgccctgtcctgcggggcggggtcgtcctcgcgggtacctggttggcgctgtctctcatttagaggcgtcgccaagccagtactgctatttgcgcctcccagttgatcttgccattgcggaagactggctgttctgcacttggtaggggggcgcccggtcgcccagcggtaacgattggacagggtttaccctccggccatagcccagccttccttggacttgcagcttccctgagtctcctgctcagtttgaaacttttgtaatttcttcgtgacttggtagttcctgctcaggaagctcccaggctaaggaggagagagacacgctctccggaaaagttctggttctagaatagacagcaggcgagaagaggaggcggttgggggtagtgagagttctccctggggagatgggagggtgagcggaccttccaggcactggaagtggccagtatgcctggaggggaccccacgtggcattgagttgttccacccctagtcagctgcaggtgggcctctccgtgctttcctgtggctcccacagcctgcatctctgagcgtggtgttggagttgcagagccgctggacagtggggcttgccctcctggagcgcagggttgggacctcggggctttggttttgctgagtggacaggaaggatgcccacccggcacgactcttgcacctggcggggcctcccgaaggacccagtgtccatatgagacctaagggtcagcatttgcccaaggtctggggccgagcactgcagatgtgcctgcttgcctctcttctgggaagtctctggggcctcaaagccaaagccaggagcatctccccaggcctggctgcttctccattccaggtcttggcgattgccccaatgtcaggtcccacagccccacagcccttctcctgtctgcccctctgagtcactgcctcacccacagccccagaaccttcatgcgggctgttggcgctcccctgctccagcactgcagcacatagcctgcccttgctgaacctctgcagcagcttcctggggccctccgaatgagcagcaaagtctttaacccaagggaggtgggggcgtgtggcaggaggggccgggggccttatcagcccccctgtggagctgtgctctattctccaggggtctagaaagcccactctggtgtctgtggggagggtatgggtagggcgggtttcgagaagcctggttaggacaggcgggggtagatgggggcacctgggctgggtagcactaagtgctggggggggtcccgagctctggcctggacagggttgggaggaagggtaggcaggaggacaggatttgttctgttggtgtggagttaatgggcggaggagttaatgggcggaggggcgagtggcgcagctgaccaggtgggcagatgcagtttgttcgtaggacatgctcagcctcataatgagctcctgcccttacctgtcctggaacagggcccctcataggcgggcttgcccctagctttgctttgtgcttgtgccgcctgtccgtgcatcctcggacagtctgctacttagttttgctttgttcctcctgagttcttctgtactcctcacttttgcccagccatgaagcttctgggctgcgtgtgtgctgatgcctttcggcgtgttcactgctgcgtactattcactggcgtgacagtacctcggctttgcttctgtcaagggaccttggcttgtttccagttttttggttaattacaagccccgtgctgctgtggacatcgtgtgccagtcttctgcgtgtgtctttctggatgggcagggcctgtcttaagcatgtaccgccagctaccaggatttatggtgggggtgtgcacgcactcagcgttactgctgggcagttttccagagtggttgtgcctgctccggcccccactgacagggacgagagtccccactgctccacatttgtgccaacactcatttgacttaatttttgccagtctggtgggtgtgaagtggtatcgtggttttaacttgaatttctctgattactaatttaggccatttgtacttccttgtcagtgaaattcctgttcctttgccagtttttttttctctttttttctgcttgagtttcagcagtttctttagagatagtcatcctttctcggctgtgttgaggatgtccccgtccagttatgagcgagtctttgctctctgagcagcctctgggtgcactccccgtgtcagcctggtggagtgtgcacattgactgtttgccaggctggggtgctggtctcgtttcggttctccttctgggaggcagccggagaagtctgcccccgggagcttgaactgggcatgctgggctgttgttggggaggcctgtgctccgggtttccttgcgacgcttttggctcagcactgttacacacggtgctcctaggtggtccacggggtatgcgtcagtgcctgtctgtggcctctgcctcctgggttcccagagtgtcctcctggtgcccatgtccctgagcgcccccacctgctcttcagcaagggctgggctgctttgtaccttgcccttcccacttgattgttttttcggttgatgtttattaatttgtttttatttatgtattttgttgttgttgttgcagagacagggtctccctatgttgcccagactggtcttgaactcctgggctcaagtgatcctctcacctcggcctcccgaagtgctgagattacaggtatgagcccctgggcctggccatctgtttggtttttagagacagagcctcactttgtggcccagactggggtgcagtggcttgatcatggctcattgtaacccctaaaacctgggctcaagcagtcctcccacatcagcttcctgagcagctgggactacaggtgtacaccaccatgtctgtctaatttttttgttttgttttgtttttttgagacagagtctcactctgtcaccaggctggagtgcagtggtgcaatctcggctcactgcaacctccgcctccctgtttcgattttcctgcctcagcctcccaagtagctaggactacaggcgcctgccagcatgcccggctaatttttgtatttttattttatttatttatttatttatttttattttattttattttattttgagatggagtctcgctctgtcacccaggctggagtgcagtggtgctgtctcggctcactgcaagctccgcctcctgggttcacaccattctcctgcctcagcctcccgagtagctgggactacaggcgcccgccaccacgcccggctaattttttttatatttttagtagagatggggtttcaccgtgttagccaggatggtctcaattttctgacctcgtgatccgcccgcctcagcctcccaaagtgttgggattacaggcgtgagccaccacgccctgcctattttatttttttgagaagctctgtcgcccaggctggagtgcagtggcacgatctcagctcactacaacctccacttcccgggttcaagcaattctcctgcctcagcctcctgagtagttgggactacaggcgtgcaccaccacgcccagctaatttctgtatttttagtagagacagggtttcaccatgttggccaggatggtctcgatctcttgacctcgtgatccgcccgccttggcctctgaaagtgctgggattacaggcgtgagccaccacgcccagccagaattatctttttaagtttcacacaaagccacatttggtttataattggaagttctttaactctgtagagcaggttggggagaattgacgtttgtgtggtactgagtcttctcattcatgatcaagctatttacttaggtcttgaatgtattttgagagttttacaagattctgctgtcatgcatatcctttgttacatttattcctagatgcttgtattttagaagtcatagtaaaagtcagctttttattatgtttgttgctaacatatagaaattcagttgatttttcaaagaaatcagtgattttactatttttaacctagtaacttatctatagattattttgtattttcaaaatgtatgttttgtcttttgcaaaagacaaagttgtttcttttcaatcctcatacttttctttctttctcttgcctgactgtgccagttgtcatagtacagtgttgaatatggttggttgcgtggattacccgtgttctgtcttgaccttaaggaaggtttccagtgttttacctttaaggacgatgtttgctgcaactttttgtggatagcctttatgcacttaaaaagtctcatcctattcatgacttgcaaaggctttttaaagaaatcattatgagtggatgttgaatataatcaagtactttcattaagaggattatataatttttatcttttcattactattgtggtaaattacataaattgattttatttcttttcttttctttttgagacagagtctcgctctgttaccaggctggagtgcagtggcgtgatctcagctcactgcaacctctgcctcccaggttcaagcaattcccctgcctcagcctcccaagtagctgggactacaggtgtgcaccaccacgcccagcgaatttttgtatttttagtagagacggggtttcaccgtgttggccaggagggtctcgatctcctgaccttgttatccgtccacctcagcctcccaaagtgctgggattacaggcgtgagccaccatgcctggccgtaaattgattttctaacattaacctattcctggaaaaatactagtttaagcatgttgtattaccctttttaaaaattggtggatatatatttatttatgtatttattttttgagacagggtcttgctcttttgcctaggctggagtgcagtggtgtgaccatggctcaagcaatcctcctgcctcagcctcctgagtagctgagactacaggtgcatgccactggcctggctaattttaaattttttgtagagatggggtctcactatgttgctcaggctggtctccaactcctggcctcaagtgatcctctcaccttggcctctcaaagagctgggactccaggtgtgagcctccctacctgcccacattggtgggtttagatgatagtatcttgtttaggacttctgcatgtgtgtctggggtctatgtgcttcctttcttctgtagtccttagcagattttggcgctaagatttccttgtgaaatgaaatgagtactgcctcttttgctgtatcgtggtatagcttatgtaaaattggaatcatttcttccttgaatgtttgggataattcacttataaaataacctgactggccgggcctggtggttcacacctgtaatcccagcactttgggaggctgaggtgggtggattaccggaggttaggagttcgagaccagcctgggcaacgtagtgaaatcccatctctactaaacatacaaaaattagccaggcgtggtggcacgcacctgtaattccagctactcaggaggctgaagcaggagaatcacttgaacttgggaggcggaggttgcagtgagcccagatggcgccactgcaaaaacatttttttttgaacctgctttctgggtcagtgtgtcaattttaatgcacgttctgtttatacttaaaaggaatgtgtgtttggcagttgatggtgcagtgtttgtctattagatcaagcttggtttactgtggtcttcaagtccgttccctttttttgtctactagaaatgtatgttaaaatcttataatctgagaatagattggtccgggttttctaacagttctgtcagtttctgtttgatactttttttttttccagacaggatctcactctgtcacctaggctggagtgtagtgggacgatcacagctcactgtagccttgaactcccaggcttaatcgatcctcccacctcagcttcccgagtagctgggactacaggtgtgcaccaccacacctggctaaattttgtattttttgtagagactgggtttttccatgttgctcgggctgatcttgaattcttgggctcaagcagtctacctgcctcagcctcccaaagtgctgggattataggcatgaaccactaacgccccgtcacttaatatatttttgaggctatgttattaggtacatacatgtttagaattgtaattctaggtattttgaacttttctcattgtatgactgcttttatatctagtaatgctttttgtctttagtattgactttgatgcaagcattcttttggataatttttgcctgttagctatttttctatcctttttaaaaacctttgtatatccttacatattagatgtgtctttggttattcagcatgtatctagatttcattttcattcactctgaccttttctgacttttttttttttgagacagagtctcgctgtgtcgccaggctggagtacagtcgtgcaatcttggctcactgcaacctctcctcccgggttcaagcgattctcctgcctcagcctcccgagtagctgggactacaggcgcctgccaccacgcccagttaatttttgtatttttagtagagacggggtttcaccatgttggccaggctggtctcgaactctcgacctcgtgatccgcccgccttggcctcccaaagtgctgggattacaggctgagcctctgtgcccggcctttttttatttttattttttattttttgagacggagtctctctcttttgagatggagtcttgctctgttgcccagggtggaatgcagtggcgcaatcttggctcactgcaacctccacctcccaggtcaagtgattcttgtgcctcagcctcccgagtagctggaactacaggtgcgcgccaccgcacccggctcatttttttgtatttttagtagagacggggtttcaccatgttggccagactggtctcgaactcctgacctcaaatgatctgcccgcctcggcctcccaaagtgctgggattacaggcataagccaccacgcccagcctaccctgtacattttaatgtgcatagttaattgtatctttactctcctgctgaactatgcagggaccttagcccactttattctaatccaaccctttcatgtttatatttatatgattttgttactgtgtatcttaattgttttcttgtgaagcccacaagatgttgttactgctttatactgtgatatttgatgagcttcaaaactcaccacttcctttgttgctcattcttcttgcatgtcaggaatcattttccttcttctgttgaatatttgttcttaggatttcctttagtgaggatctgctgataactaccttctctttctgtttgtctgaagatgttttagtttaccctcaccctgagcagggcgtgtgctggttgtacgatgctggggtggtgtgtgctcctcccacaggtccaggcagggcgtccctggctttgacttccagctttgctgtaagaggtcagcggccgtgacaggctggagggagacgtctgggtggctttgtggtcatgtcatcgttgccaacggtcgtctcatggtgggtcctggtgtgggttctcttgtgattgcctgagtcggggttactagacttgctgactttgtggatcgatgattttcatgagtcccgggaagctctcagccactttttcttctgctgttggttctgcgctattctctctctcacctctggagcaacaattggacgtgttgctcttcctgccggatcctccacatccatagatgcactgggtggtgtcagtgggcggcggctggctggggcagtagcctgtctccagcccttccccctgcctctgtccacgtgcaggggcgtctcctcaggacgcatgttgcctactgaccgctgccagcctgcacgagactctcacggcgggaccctgtctgccttgctcggtgctgcccagagcctgcacagtgtagctccttggcggacgttcctgtaatggaaccaggatgtcatgccaaggagtgtggtttcattttgagtggtggggaagtcgctggactatttcaagtgtgtgtatttgggagagcagtgctgctggagtggtggaccacactggaggtggagattgcctcagggtgtgcaggtggagatgggtgggaggtgtcgtgcagggcttgggacagggctttcggaggtggtctgcagtgatccagggaagatgggctgctctgagggaggggctgaggaagctgacctgggcagccagtggcctgtaggctgggcagcactcgagctggggccaaggggcagcaggacggtgcccgtagccctggaggccttggggattcggaggacctggcccatcgccgtggcctgcacggtgcgtgcacaccgctctgtccgcgcaggctgtgccctgctttcaagatgcctggaaacctctggcagctctgtcctgctgtcaacactggagtcacatgtcagtgggtctcctgctggggactggcttttgtgcaggagatggagggcagggggctacagtgcccttggactaaaggatgctttccttggatctgggcactagaaccagccctttccctctctctgcccagcattctcagcatgcgtctcaggaaggtttgatggagtgggcagctgcggtgctgtggcggggtcggggggctgctgcagagagcgggtctgcggtcagtcacagtgacgggggtctctttggaccctgtgacttgtgtgtggtggtggcaggcagtggcgttgccgagacagggtgctcaggtgcaggtgggaaggggtggcaggatggaggttgtacagtgctttccccaggaccagggggcagggtgtggcgtgcttattcctgcctggccgtggagggtctctgtaggacaggctcccgctgagggcagccctgaggcctgtgagctgctggccccgcagggtggctgggcctggctggctcagcagctgctctgagaggcagccctaaaaatagccgagcgctgagaggccgtccctttctgctccgcaggcgcgcgccgatgtgtgctcagctcaggccgacttagcagggttgtgagagtgatgagagcgtggctgctggtcatggtgctggggtcgtcagcagctcctcgagggctccggcctgtggaggccggtggcgccccgtctcaccccacggatggggggcaggctctccaggagccccagggagcactggctactgctgggctgctctcaggcccgggacattcatggccgtagccccaggtcctctgcatggtcaggggccatgctgggtcccctggggtgcagatgccgctcaacagaggagtcaggacccaaaaggggcagaaatgggcaagggaagacactggggaaggggtgggtctgcccttcctgctgggggtgcacacgggcctggggctgagcaacccgctctgggcctggctgttccgctccactgccccaaccagcctttcctcagcaccccctggccaagctgtgggcaccccctgcccccggacacaggcagcacctggccaagtgcagagacactccagctggctcttcgcctgtgtcccagccctgagggcaccgtcgtagggtggtgggacgggggggggctcggacacagtggttgtggaggggtcagtgctgtggctcggggtggggtggggctgggggagggtttgcttcagggtagcggctctcttcaggggttcagcaaggagacagatgggttctaatgacccctgagtcctgagacaaggtggggtgagctggagcaggggaggggacttggaagggccttcagtccccatgcagcccttgcacaacctttcgggccaacatcctgggccttgcttggcagaggagtttgggatccacgggcttgaggcccaggtggtcagctcgctcggtgcaatgctgtgtctcgcatttctgtctctcgactgccccatccagcccgtgtcctaagagcagctggcagcagccgccacgcacaggcagctcagctcagcagccccaggagccaggtgtgtcttgagctgggcagcaaagtggccatgcagtccagcctcccttcagccttccccaggatgcctttcatcttggggagatggccattgtgggggtgaccagcactgtcccttccctggcaggccaggatgtggatccacagcgaggcagacctgcagatgcacatccctcttctcaaatgctgttcttgttctggtgagcacggggaacggcaccaagccaatgctgatgggaagggccctgaccttgggctgctgtcctgcgagcttggcccctctgctgggcccctcctccatgcctttgtttactctccaaccttctgggagtcccacatctgcatcaggacagaggtgaccagggaccagttgacagctaggatgccaccagcatcttttgtttaatttgagtctcatttcccagtgtaattctgtagctgaccttgcaggaggcattgacaatatttctttattgtatggccccagccaggacttccctctttttagatgcaaaataattgggcaagacttttcatgggcattgcatgctgggctcgtgcaggtgtctccagggccgcctcgagaccagcgcccgcctccctggtcctggatacaggtggggcgggggctcccccgcagcagtggagttgagacccgcacctgcttcctggtcctggacacgggtggggcgggggctccgcagcagcagtggagttgaggcttccgtatgagctcgctcctggtcagtttgagggtggacataccagacatcctgcatcttcccagtcgccccaggagcgcctcaggagggtgagtggcaggaggccgatgccctgctagcaggcagtccctcggggccaggccttcctggtgcggtgctgaattgggctgttcgttcctctgagcaccaaggagagggatggcggctcaggcttcaggcagtgcccgccggtgcctctagaaggtgctccgtggtggggcccgggagggtggcccttccacattctcgggctgcctgtgtgccacccaagtgtcaggtcatgaggcccctcggtctggcctagggctctccttcctcccccacctcaagcctggggtgtggcctagccagggaggggagcgggagctctggccgtgaagacccaccctgaggtctgggctctcctggcctgagcgtgctttctgctatgagctccacgttcaccctgcggccaggactctactgttcctcctggtgggagctgctgtggtgccctgggtggcctccagtcaccgccagcctgccccttgcagtcagtcctgctgttccttcggctcctgcagtttccagcttggccctggacttcctgtttttcccacctagctggacgtaaaggttgtcgcgccttggaaagttaagtcactacacccgaatcgacgcactcttggctcgcctggctatggcttcagctggaaacggagctgagcgtggcttatgtttataaatacagcacctatcaggtccagcgtcgctgtctcctgcgggaggtgtcagctttgggcgtgaagaacagctgcaaggccacagggccaaggggtatctcaccagctgggaggccggcgtgcctgacctggccacacagagcgagcctcagaagcgagggggaaggagggcaggccttggggaggggtccaggaaggtcgagaggctgcagtggtggtagcctgaggggatgtgcgcggccaggtcagtgcctgccgctactgcctgctgcgctgactgcctgagcactggggatcgtgggcctgaggggcggggaccttggctcccgtggatagctcctgcaccatcctcttgcttctcagaccctcggcaagtggtgacagggggctggggtggagttgttctcctgccgtggtcctgtcaaatggtgctgggggcggggccaggaatcacagcaggtgtctgccgctagcgctcggagcctgtgctgggggcagggtggtgcatctcatgcctctgccgcttgctcactgtacttgcctggggaggatgtggcaggggcagaggacagctggccaggctcttggactgcacctgactctggtgggctatcgaaggttttggaggtttctttaattagcaacatgatatccagagattgcgactgtggctcgagcggttccctgccagggagcaggaccattgacagccgagccttgactcaccggcccaggccacccgaggggccattgacaactgagccttggctcaccggcccaggccacccgatggaccattgacagccgagccttggctcaccggcccaggccacccgaggggccattgacaactgagccttggctcaccggcccaggccacccgaggggccattgacagccgagccttggctcaccggcccaggccacccgaggtttcactgcggattctatcagaacagtgcctccccccaggattcgtcaaccttcagtggaccaggccctgcagtggttccagttattccctgggaaaatttccagcactgattagggggtgactcttggtcagaggttgagtgtttccctaggtgtggaggtgcacggagaagagaggggtgcagttcttaaaggacacatggcttatgccacaccccctgccccaacccccggagtggccagctttcctttgactggggaggaggcagctgtccagggttgtcctcacctctcctcctggagaatgtggtcccttcagaaaggggacccagtagtgggtgacctggtgcaaaccacccactgcctcctctgggccttcctggggctcttcggctctcaggagaggagggagctcaggctgtggctgctctgtgagttggacacggacgctccagccgctgggcccagcagtgtgaatggccatagagaacaggggcccagaggctgctctcgaggacactggcagcagttgtgctctgggctcgccatccttgaagctggaatattccacaagtgccacgcacttgctggaggtactgcctgggggtagactgtggccaggccctcccagcagcccgagtcttggcgcgtgggctggactcccacactcagcacctttctgctgacctgaacacccagggcacagtggcagcggcgtcattaggatttccaactagctgtttctgttaagagtgaagaggaaaccttgtttgattagactcattgtaaaaaagattccagtgaatctcttgcctgctgtctttgcagttgcctctaagggtcacgaggcagggcggcgtcctctctcagtgccactgtgacctggcagcacctcttttgcatattattgacctagagagagaggtcaattgtaattcggagctgcacagtcggaaaatttgtagcaacagagaattataggcgctctaggcattcgatgaatcttctccaccttgctgtggggttaattcaggggagcagtggggagtgtgctgggagtgagattagagggaggactccctggaggctggccctgcgccctggaggccagcatggccctggtgctggctacatcctctggggctcttcctcatctgtctgcagaggaggcagctgtggagcgagggtgtgtacgggagcaggatgggctgcacagaagcctttccgggggtgcctgtggtttgcaggggcctggctgcagctgccctgtgtgatctctgtccccgtcttctcccggcttccttgggtcctgtgtgcccaacttggcacttcaagatttgctccctggcaactgttgcctttcccagaagagaagtccctggaaccaggaccagcctgctgtcacctgcctgctgctcctgccccaccagaaccatcctgagtccaaactggctgagagtcaagggggtgttcagggcctccaggagctctgggagagtctaggatgctctagatccttgggctcatggggcagtagagtggggggctgtggtcctgggcaccctctggagagaccgctctggtgtcagccaagtggcgggcaccttctgggcttgggggcggggcttctcacgatggctcagggaggtccagacagcccccttgtctaggtgcgcacctggagtcctttcctgcgtgacttgcaaacaggccttgcagggctctagtgtatcagctcccggactgcaggcagcagcaaactctgccgtgtggtactgcttctcatggacaggagaccaccaggctccttccaggagggtgaggtctctgcagcgggagcatccaggcctggaactcgagctgtggtgtggtggtgccagcccaggagccaagcacagccaggagatgaaacccatccctgtggtctgcacgtccatgccagggccgagcccccagctgggatgccctgggagggtgcagggtgggctctggatgcctgctgggggatttcagtgagaaccaggaagggttgagccagagcctccgagaagcctggggtccatgtgtgggaaggaacggggacagggagcctccgagaagcctggggtccgtgtgtgggaaggaacggggacagggagcctccgagaagcctggggtccgtgtgtgggacggaacggggacagggagcctccgagaagcctggggtccgtgtgtgggacggaacggggacagggagcctccgagaagcctggggtccgtgtgtgggacggaatggggacaggagcctccgagaagcctggggtccgtgtgtgggaaggaacggggacaggagcctccaagaagcctggggtccgtgtgtccgtaggaacgggggacaggaggttgtgaagggcgtgtgggttccgggaggctcactatagtgatgtcctgccttagacgaggtcacacaggggaaggttactgtgccgcagagttttctttccgagcactcaatgctcacctcctgggagggagtggggccgcagccagccctgacccagctgggtgtgtggccgctctctggacccccggtcccagggtggcagctagtgcagcctaggccacaccagcatgacccctcgcccctgtctccacggagcaccgtgggactctggcatcagaatcctggggccccacccaacacccacgcatttcctgtcttttctcaggcaatcgccatggtacccagggctggccttgtttcagcttcctgacgagtgccctgtggtcagtcatttctgtcctcgcctttacctcaaatcctgctttttgccttaagtgcgttcccaattccatctctgtgccagctgtgccccatgcagcctctaccggcatctcacgtgatgtcaaccttctgggtccttggggcctagccttgctctggtgaacggctttgttggatgctggggttggcattttttttttttttgagacagagtcatcctgttgcccaggctggagtgcagtggcacaatctcggctcactgcaaccttgcctccagggttcaggtgattctcctgcctcagcctcccgagtagctgggattacaggcatgcaccgtcacacccagctaatttttgtatttttagtagagacggggtttcaccgtgttggccaggctggtctcaaactcctgacctcaggtgatctgcctgcctcggcctcccaaagtgctgggattacaggcatgagccaccgtgcccagcctgggttggcttttaactggcaagtttagtctgtgtttctgtgcgatgatatagttgcatgtattcctgtcattttgatcattttgattgtgtttattacgtatttcctctcctaagttttgttatttcctcctcggaaattaaggaaggatcaagactgattgaatttatttgtatttttgagacaggttctcactctgttgctcaggctagagtgcagtggcatgatcatagctccctgcagcctcaaactctggggctcgagtcatcctcccatttcagcctcctaaagtgctgggattaacaggcacgaaccattgtgcctggcctgagttttatgtattacccactccaggaaatcactgtagtccttttaactgttactgatttgcttaaaatgtgaaaggcctgttgacatttaaggatagtcaacaaccctcccaccctccaaaggaaggagagctgaaatgcaggagaaacagcaatgcctttgatgagtatggctttgctgctactttgctcacctgtggccctgcctttcccaaggatagtttttgttttcctggagcacatccttcagaagctctttcagtctttcagtgcctgaagatggcgtttttgtccccctcatacttggtgatcacagagttcttctaggttgacagttttgtctcctcggtactttgacgattgttttattgtcttctggcctctgttgtggttttgaggagtctgcgatcagcctgctccttgttccttgtgggacacatgtgtgatctgtggttgcttttagcgtttttattttgatttggtgcggatttgttatcaacattgcttttgatcctccttgggacttactgaatatgagcatctctcttcttgttttggaagaatcctcagtcagacattgcatctccttccttgggtggaagctgctcagtcactgtcctgtgccttgccgtggggctgcctgtgcctctgtgcctgcttctccttccatggggagcccctcccagcccctcactggcgctgggaagcacagtggtcctcccctctgtgggctgtgttgagaaatgttgctggctagtcccagacccacaacacggagcacgggggttttgcctggtgcccgtgatatcagtggggagtgagaggagcaggtggccccctcggctgtgttcagggtgtgcctgtgtggccgaccacctccaggactgaggccacacaggaagcagttgggattgtgaaaacccccatgggaagctgtgctgatcctcccctgagcctgtgacagctgagggcacaggcaatggtggggctcggtgcctggggctgagttgggaaggtttggtgtctgacccacttcttcccaagtgggagctccctcctcgggcactgcatggcttctctgcggggcctctgcctggtcctctcgtgggcggtccaagacctggagcccaggaggtggattctgaggtctgagtcccccgcaggacagcagttccatcctctggtccctctcctgcccccaggggccagtaggttacagacaccttcctgaaactccctggaggggagcagccttgattcctaaacaagaagttggtcctaagtgcatcctcttgatgtggggcagagaagaaatctgagacagtctcatgcccccaccgccatcgtccccccacttttttgtgggggtgcccaatctgtgctctgccccctccccaggctccgctcctgtgggctgcgtcgtggtttctcctctctgtgggacgtgtgctgggcccctgggggtggatgcagaccgagcctgggcccatgtagaccaactggcgtgggtgtgagagagagagacgcatacccactcaggcacatacacgtgcacacacacacccatgcacgcgtgtgcacacacaccctggccctgttccctaccagtccccaccccctcctgctgcatgtgctcctggttccctctcttcacctgacagctggagtcatcctcctgcccacagccgtgccctgtgcagagcaggtgctggttctgccctcccctggcctgccccaggcggggacactacactgggaagctgccccgttgcaggcgttcccatggcgccactgctgtgttagctgcctgcagcacaggccggccagtcctggggtgctggacagaccctcctggaagccagtccctggccgtcctgtcctgctgggggcacagtgtctcggcagaaggttctggctgctccctggggtgctggcttgtgtcacctggctttgctgggtcccagtgacatgcagtctggggatgttcctgggacccgttgggcttgcggtggccacttgggaaagctgagcactgaaagtgccaaaacctgggacaccttcttgcaggcccactcttcagcctttgccccgtgggccattggggagggaggaggtgggaggttttggcaaagcagcccaaaggtccacacagacccagggctggcaaccggcccggcctgtcacccttctcactgagggtcacagcctgtggcccatggcagggctgcccaggacaggggcttggccccggaggcctgcagtgtgaggcgtggcccacaggccttcccagagggggttctgggagcctcccccagctgtcacacgcacctgcctgtgcctcacccgggctaaaatagcccctgcacagaaacgcccttgctgggcagggcccattcctgctgggagacacctgtcagggcccttcctgcctggggccatatggagtgtccagcctgggggtggtcgtggggtgtcgggggcctgggcctggatccacgatgccctgtctggtctagagcctggcctggcttccccttggcgtgactgcccacaggcagtggccgccgtctgctcagctgcatcctcctgcgttgggctcatctgtctgccttcccctgacacctcctcctgccagactccagggccaagggagtgggccccggctgcagaggcagtgccagctagctgagtgggtcaggccacagaccccacctgactccagggcagcgtggccaggagagcattggaaggagagagctgttcccaccttgaggctgacgcagaccagacctggctctgtcctgagcagcagaaagtatgtgcagggcttcaccctcttccctctgtctgtgtagagctccacctgaggcccagtgtgtgcgtagagtcccacctgaggcccagtgtctacgtagagctccacctgaggcccaatatgtgcgtagagctccacctgagggccagtgcctacgtagagctccacctgagggccagtatgtgcgtagagctccacctgaggcccagtgtctacatagagctccacctgagggtccagtgtgtgggtagagctccacctgagggccagtgtctgtgtagagctccacctgagggccagtgtgtgcttggtgcccacagctgagttagcccaggctcgtggtcatgctcacaggtgcacgtggccacacaagtcactgagcacagacccagatgggatgcagctcataacgtgcactgcgggggggagctgtggcatcttttcccagagcccctctggtctggcagcctcgggagtgtgtgcatggtatgggaggtgggaacagagctgggaggggctcccctccatggggtggggttcccctccagctgttggtgaggcacactgtacacctgcacacctgtgcctgggactgttgggctggacgtgtaggaacatggaatggcccctgggccttcgggtgactgagacagaagtacaggcccagcaggtctgaggacagggcctcctgatgactggacccagcctggacaatggccggcagctcccagccttgccacaggctgactggaatgcgtggtgtggtggagcccagcactgagggccggacgtgtgtttgcagcattgttctcacagccacctcggaggcttccctgctctggggcagatgccgttgctggagccgtggtgctcccagaggcaccctgggctcagctcagcccccataggccagtgcctggagtggctgtgacgctgtggccggcgcctggcgtggctgtgacgctgtggccggcgcctggcgtggctctgacgctgtggccggcgcctggcgtggctctgacgctgtggccggcgcctggcgtggctctgacgctgtggccggcgcctggcatggctgtgatgtgctgactccggcaccatcagttccttcccctattctggggcaggtggggaccacctcttcaccctccctcatgggcagggctggcctctgctgaggtggcccctcactgggcccaggcatggagacccagtggtcctagccctcggtgtagtctatccatgaggcacctggctgagcctgttcctctcactccacagcagcctccttggccctgaccactggccaacgaggacactgagaaggcaccctgaccttctgtcctcattagcagggagcagccatgtccagataaggctgtacatcagagaaagctgagtgaggctggcaagagctggcagccgccctcggccgcccgggcgagccttgggacgggctgggtggtaagtgctggtgatgcaggagcagagagccccgtggaactctctccatgaggacggcggtgccctggggcccagctacgaggatggctgtgcaggcacctggagcctggggatggcagggcgtgggctgagcatgtggagcaccagcctgtgacattcctctgcccaggggcagcagggcacggagcgtgtgtggccagctgccgccacaggcccccagctcccacgcgggcaggctcgcgaccgcaccaagggggcagctcctggagacaaaagctcctcagttttcccttccaacaaaacacagtcagcaggtttgggaccagctgcctggggtcttaaccatctgtgctctgtgcgcgcccccacccccttgcctgcctggaggaaagtggtggggttgacatgcgcctcgagggccagccgggcgctggtgcatttctcagaaatccgtgaagtgctcccttgtcctgctcgtgttctgtgctgtccttgggagtggcgcggccgcttgccagggctgcagagttggccacgcagcctctccaggaggccttgagccaagcacaggatgcagcccagcagtggtggcaccgtggagtggctgggcggaagagatcctggtccacgctgctgtctggagggcagggtcctcaggtgaccagagtccgtgcaggagcgagtgaggacagggctggggcaggcggcaggatgaggccgcccagagcaactcagtgagtgaatgagtgaaagcacgcacgccccatgctccagcggggccagagtgtgctgttgggtgagtctggccttccttcctggggttgtgggccctacttgtgggaggccactgtggggagggcgtccttgtagaagtgttaatcagagtgaaagccagtccctgtgcactgctgctgggaatgtagcatggtgcagctgttgcggggaacaggacggcagcccctcgggaaatgagacagagttaccgtcagagttactgtgtgagctagcagttgcacttctcagtagaacccgggagcactgacgcagggcctccaggggagatctccaccctgtgttcacagcagccttactcacggtgactgcgtgatggacgcagcctgtatccatcctcggacaaacaagtcagcaccatgtggccctccgcaccacccagcatcactgggccctcggtcagcaccgcgtggccctccacactgtggaatattacttagccctgaaaaggaaggaaatggacacaggctgcaacgtggatggaacttgagtatattgtgctgagtggaataagccagtcacaggaggacatgcactgtatgatcccatttgtgtcaggtccctagagtcattgcattcatagggacggaggtaggatggtgcagcctggtgatgccaggggccggggaaggtgggaatggggagttggggttgaatgggtagtttcagttgcgcaaggtgaagagagttctcgggatggatggcggtgagggctgcacaacagcatccacgcacgtagtgccactgacctgcacactgaaaaatggttcaaacggcaagttttacgttatatttaccacaataaaaaagagaaatagacatcgtcaagctgttctccaaaataaggctgtcaccgtttaccttcctaccagaaaaaaacagttaagtcccaaagccagggggagcaccagtgttaacctcctgggttggggctggctgagcccgtggctatgcctccctgggcttaggtggcaaccctgcgaggagcttgggcctctcgtcttttgggttcctgttcaaaatgggaagtggtctccaaaccccagggcccacctgagccccctgagatgggaacctctccagacctgcccctgagatcctgtcccacccctggacaagggcctctgtgcctctgaacaaaactggggggcctggtgcagagtcctagctcaggcttccagaagtcagtggtttgaaggggtgcccacccttgctccgttgggacatagggacgcaggtgcctgtctcagcccccacatgtgcacccccaggggcagcagcgtcccctccagtctctggtttgcatcatgcacaggagtgggtgggtgggagtttcagtctcccagagagcatactgttgggccatgctgtctctggcctcctcacccatggaggtcctgccccgcccccatctgaggctgggtggccgaggggtctgttctcagactggggcctggcgctggcccggtttcctggaggaggaagcgggggagtgacctgcggaggacttccagcctccccttccgcctgctgtgggctgcatggcgctggggctctgcccagccctggagagtgttggctgctctccttccagctgacatggaaatgccatgcagggcacgcacgtggggcactttctgctgagtcaggtttctctgaccttcctgaaatgtcacttgttctgtaactcacaaaaactggggtgctgggatatggtgccttccttctcccggaagtccctgccgaggggggcggtggtggggcattcccagggggtgtttgtcctttgctgtctttactttcccaccttgttccttgggcctcccctgacctattgaccctgccacagctcgctcaccccaggtccctgggggctgtgcaggattccgggtcctccagggccagtgtgatccttgctgggttctcagagtgaccctggagggaggtcccctgccgaccctcacctcccgttcccaggtcatctgccccagggccaggtgtccatccaccctgactgtgaccatgtgcctgtgacctgcgtgactgacccctgcccttgggtgcccaggcctagcagtgccccatgccactgggtccccaggcatctgccaggaaaggacagctctaaagtggccagggcagcaggggtcctgatgtctgttgaaggcccttggaattccctggcttcattgtgccatctccccgctcttctccctccctcctgcctcctgtcttcctactctctcccctccttccacccacccagctgctctcctctctgagcctggccccacaaccagaggtgctcactcctgccttcaactgactgcaggtatccaggcatctgggctgagggtgcctctgtggctttgttgaccaacccaggctgacttcagaggtgctcttcagcccctgctttgcaagttcctggggacccgtggctgtcactttggccccttgatgtttatggtggttcccgtagctaagtggatgctgccaaagatggaaagtgggggacgctattccactgccactcagagcgagaccaggtgcttcaaaaagactagcagggttgggtgtggtggctcatgcctgtaaccctagcactttgggaggtcaaggtggggggaccacctgaggtcaggagtttgagatcagcctggccaacatgagaaaagcccatctctactgaaaatacaaaaattagccgggtgtggtggtatgcacctgtagtcttagctacttgggaggctgaggcgaaagaatggcttgaacccgggggcagaggttgcagtgagctgagatcatgccattgcactccagcctgggcaacaagagcaaaactctgtctctataaaaaaaaaaaaaaaggaagaaaaagaaaagaccagcagggccaggtgtggtggctcatgcctgcaatcctagcactttgggaggctgaagggagaggatctcctgagcacaggggttcaaggctgcagtgagccgtgattgcaccactacactctagcctaggtgacagagcaagattctgtctctattaaaaaaaaaaaaaaaggaatggagatgacaaagaacaagtcttaattgaatattaacaaaagccagaagctgattggaaaagcttaataaagtagcaaacatgcctggctaatttttgtatttttagtagagaggagtttcaccatgttggccaggctggtttcaaactcctgacctcaggtgatcagccctcctcggcctcccgaagtcctgggattacaggcatgagccaccacatccggccaatttttgtattttttgtagagatggggtttcaccatgttgcccaggctggtcttgagctcctgggctcaggtgatccacctgccttggcctcccaaagggctgcgattccaagtgtgagccaccgcgtctggctaaggagtattttccttagcagatacaaatttatttaaattagctatgctagttaaaacaatatggaattggcagaagtataaacattgactaatggaatgtaccagcagaaacacatgcgatcgtaatgtgcttcagaaatggcctcattcatctgtggggaaaggatatacttctgggtaaatggtttggtgataactgaacattcatgtaggaaataaaatgcaatcacaacacacacaactccaaatggatggataatctcattgtgaaaaagaggaaggaacaaatgggggagtgggatggattaaagcagtggtccccaacctttttgccgccagggaccggttttgtggaagacagtttttccacagacggtgatgggaatggtttccagtgaaactgtcccacctccgatcatcagccatcagattctcataagcagcgtgcagcctggatccctcgcgtgcacagttacaatagggttcttccggagctcaggtgggaatgctcactccctggtgctcatctcctgctgtgcggccagttgctaacaggccaggaacctgtcctgggggttggggacctctggtctacagcacaggtgacttttctgtaccagagctaggaatgaagggctggctgagctggtgcttcctgccacctgtgtagtggtgcaggtgtccatggtccagggctggccaggggcatctcctgtcctggcttggcttctgcccctgggtccgtggtggctgcctgggacctgcccttgcagccagggtgaaaggagtgggcagggcctgctgcctctgctcagggcccctagtggggctgcttgctcagcacccttgccccgtctctggccacgtagccgtcacccagctagcatggggaggctcgctaccaaggggtggggggctggagaacggagcttggagacagctggcagtctcggccacacatagagacacccgctcctgagacctgcagtgcctgcagaggggaagaaacggggctggcggggagagcacacagtgcgtttctgtggtcaggcccctttatttcttcaaatagatcccaagtgtagagaacatgtgctcattcttgttggcaggcctgtgggtttttgtgtctcactctgaacttttcctgtatgcctctcgcttctctctgtcagaaaacaaaacagaagcctctattctctgggattcggattcaagtcggctcttttattcacctatttcgagcagacacaatgaaagaggaaacagataacactgtgggtattcagcaagttgtcttggatgtgaacattgagtttccacttgtcactgtgattttattttatattgagttgtttttaaaatatgctttgcttcactttcgttgctgttgaatctattacagctgcacggtgtcctgaacacagtggcaggctggtgatgaatcgtcttctgtaggttttctggtgtctttgttatgattctctcagggccaagtgtggtgcacctggcctgggcaaacctttaggcctcgctctcagaaccaactgtggataataagcaaataacatgttttgtttatctgcgcagtttctgaatgcaaatgattctttttattccttattttatttatttatgttttagagacagagtcttgccgtgttgcccaggctggagctttttattcttcgtgtttgcacagtggctgtagctatgtgtagtgacagcagagacaggcctgagaggggcagccacgttccccctgggcaggatctgtctgctacgggaccgcaagctgcgactttttccttctaagtgtgcggagaggagcccctgcctagggacggggagccgtagcctgctgtttttgtgacaagcatcttgggcgagggggcactgggctgtgctgcatagatggtgagcactggactcacccccagccccaagtcaaacgaatgtaaggaacgtgagcttctggaaacgagcgtggaagcctgagtggtgaggaagggaaatcttgcagtacctgcacactccccaaatgcctcttgtgggtttgcagtacctgcgcactccccaaatgcctcttgtggatttgtttgtttgtttgtttacaattagttcatccacagcaggatccaagctgctgcctgtgtgtgtgtgtgtgtgtgtgtgtgtgtgtgtgtgtgtgtctatgtgtgagagagagagagacagggtcctctgtcacccaggctgagtgtagtggtgcaatcacagctgactgcagcctccaactcctgggctcaggtgatcctcccacctcagcctcccaagtagctgggactgcaggtgcgccccaccaagcccagctaatttttgtatttttttgtagagacagggtttcgccatgttggccaggctggtctcgaactcctggcctcaagtgatccacccgcctcggcctcccacagtgctgggattacaggcatgattgtgcccagccacagtagagcttcttgtttgcagttggttggtgtgtgtcttgtggctgtctttaataaaacaaaaactttgcaagtatcgtctggtaggccaggcgcagtggctcacgcctgtaatcctagcacttcaggaggccgaggtgggcgggtcacttgaggtcaggagttcaaaaccagcctggccgatatggtgaaaccccatctctagtaaaaatataaaaaattagctgggtgtggtggtgcacgcctgtagtcccagctactcaggaggctgaggcaggtgaattgcttgaacccgggaggcggaggttgcagtgagccaagatcgcaccactgcactccagcctgggtgacagcaggactctgtcttaaaaaaaaaaaaaaaaaaagacagtattgttatggtaaaggttcacccctcacaccttttttcgtatgcagctctgagcttaacatccaccatacaaccaggcacagaacactgggcagtccacccaaaacagtccccagcagccaccctccctactgacctggccttgtgcccccagctctgccttttccagagtgccatagagatggacaaaaatggtgtgtgccctcttgacacgggcgtctctcactcaacacgatgccttccagatccatcctatcacgtatcgatctgttcctagctgttgctgaatagtaccaaaatgtccttgtctttgtgtgaaggacatcggggtttccagtgggtggcagttatgaatagagctgctgtgaatgtgcattagggatctgtgtagggacatatgctttcatttcccttggaccaattccaaggggtaggattgctgggtcctgtatgtttaactttgtaagaaactgccaaactgctttccagtgactctgccatgtggcgttctgcacgttcagagtatatggaagtcccagtggttttgcttcctcgccagcatttggtattagctttttttatttttcatgttttttaagccattctaataggtgtagttggtatctcgtttggttttaatttgcatttccctaataactaataattttgagcatcttttcatgtgcttatttgctatcaatgtatcttttctggtgaaacgtctgttcaaatattttgctcacttttttttttttttgagatggagtcttgctctgtcacccaggctagagtgcagtggcgcgacctcagctcactgcaacctttacctccctggttcaagcaattcccctgcctcagccttccgagtagctgggactacaggcttttctcactttttattaggttgtttgttttcatattgttgagttctgagagttcatatatttatatattctggataaaatttttgtcgaatgtgtgatctgtggccaggtgtggtggctcatgcctataatcccagcactttgggaggctgaggtgggcagatcactcgaggccaggagtttgagaccaggcctggcctacatgtagctgggactacagatgtgtgctgccgtacttggctaatttttatactttttgtagagacagggtctccctgtgtacccaggctggtctcaaactcctgggctcaagtgatccacccacctcagcttcccgaagtgttgggattacaggcatgagccacccttccctgcctcaacttttaatatatggttgaatttgcctggaagtttttttttgttttgttttgtttttggaagatttaattaattaattgatttatttttgagacagagtctcactctgtcccccaggctggcgtgcagtgatacgatctcggctcactacaacctctgcctccccagttcaagtgattctcccacacccggcccagaaaatttaacaattaattcaatttatttaatagttgtaggactataccagctatctatttcatcgtggggagttttagtagtttgtggctttctagggaaatgaaaattggtacattttatcaaagtagtcaaatttttgttcatgaagttgtttatagtatttcccagtagtctgtaaggtctgtagtgctttccttcttttacttctgataatggcaacttttgtctactttcttctttgtttgggtagaggttttatgaattttattgatcttcccaaagaactagcatttggttttattttattgtttatctattttcagtttagttgttcctctttatcattataatttccttccttttgcttacttggggtttaatatgttcttctagtttcttaagatggaaccttagggctgggcgcagtggcccagtaatcccagcactttgggaggccgaggtgggtggatcacctgaggtcaggagttcgagaccagcctggccaacatggtgaaatcgtgtctccaccaaaaatataaaaaattagctgggcgtggtagtgcacacctgtaatcccagctgcttgggaggctgaggcatgagaatcgtttgaacccaggaggtggaggttgcagtgagccgagatcacaccactgcactccagcctgggcaacacagtgtgactccatctcaaaaaagatggaatctggctgggcgcagtggctcaacgcctgtaatcccagcactttgggaggccaaggcaggcggatcacgaggtcgggagattgagaccatcctgcctaacacggtgaaaccccgtctccactaaaaatacaaaaaattagctgggtgtgatgtcgggcgcctgtagtcccagctactcgggaggctgaggcaggacaatagcgtgaacccaggaggcggagcttgcagtgagctgagatcacgccaccgcactccagcctgggcaacagagcgagactccgtcttgagaaaaaaaaaaatggaatctttagattgtgtatttgaatcttttttcttttctgacataagcacttaatgctataaattctcatttcagaacggctttagctgcacctggcagattgacgtgctgcgttttcatttacattccattcagagtgttctctgatttcctttgagacttcctttgatccataggtttttgttttttagtttcccaagcatcccaagaggatttccccgccatctttctgtgatagattgctagtctaacgccattttggtcagagaacgtattctttgtatgatatcagctcttttgtatttgtgaaggatttgtggtgtgacccagcctatggtctatcttggttcatatcacctctcttagtctctctcctctgtctttcttcctcttgcattgtgttgagtaagagagagtctgtgggaatccgggcagccccagtggagtggggtggaaccaggacgagggtccctgctggaggagcgccccctcaggccaggcccttccgcgtttctgccaagtcctaggagactctgacttaatgcctgacttattttgtgatatactgagttatgagaatgactttaaagctcacaggtggcctcagagtgcaccttgtgctcacaaacactgacgggcgacagtggacagtctgactgcagctcggggaatgagttgaaggactctgacagagatgtctgtagtaggcaggcttgtcacactcattgtttaagctccatgcctgtttacctaaaaagctggacttaaatacatcgaacttggaactcagaaaaataaaacatcttctgacctgggtaggtccgtcttccagtgttggaaagcagactcatttccgggttagtcctgtgctgctttttgacctacactgacccgatcttgtttggaacaggccgccctgtgcatgatttggtcccatgcagaatcacacagcccggttggtgactttgatggctgtcaggcactgctcgcgtctgcagccctgtctgcagagagcaccccgtggccctgcatgcacggctcccccacccccgcccacacaacatcccccccaccgcctgcacggctcccccacccacacccgcacaacttcccccccaccccctgcacagttcccccactcccacgcgcacgacttccccccctaccccctgcacggctcccccacccccacccgcacggcatcacccccaccgcctgcacggctcccccacccccacccgcacggcatcacccccaccgcctgcacggctcccccacccccacccgcacaacttcccccccaccccctgcacggctcccccacccccacccccacgcgcatgactttccccccaccccctgcacggctcccccactcccacgcgcatgacttcccccccaccccctgcacggctcccccactcccacgcgcatgacttcccccccaccccctgcacggctcccccacccccacccccacccgcacggcatcaccccctaccccctgcacggctcccccacccccacctgcacagcatccccccaccactgcatggctcccccacctctgcccacacagcttccctacccccgcctgcacggctcccccactgcctgttgtccgctgtccccgttgcacctcccacctgctgccctgctgtcaagtcaggcgcgtcccacccagagtgctctggtgtctgccccttggcttctctcagcagctcagtggagtgtagacagtgtagtagatcatcacctgagcagccaggatgggagtggggtctctgtggtctccattttacaaatgggttgacaggtgctcaggaagccctgtgatgtcctgaggccgcccaggcagtcatacacaggctgtacccatccagtgctcccgttgcctgggggcagggatgtgtgctggaagggcctgggactgccttcccaccgccatgtccacacccaatgcccaggggtggagacggaagcacgtggcggccactgtggcactggtgggtggctgcgttccatggcctgactgtgtctggcgcctgttctggtgttttacattcatactttgagggccaagcaccagcccaggaggtgggtgccacaagtccagacttccccaagggaaagtgtccccagcacagactcagccactcagaacttgttggtcttagagcctgaagccgggcagggcagacagtgccatccctatctggatggtggtgccttcacccttctgctgtcctgagcaagaagaaaaatgagccaagcttcaaagagagctgtgccaaagtttccggaaagcttgccagtgtgggtgttgcaccccacacaccttcaggcatgggtgggtggtgtgggcatcttcactggatggatttggagccctggcgcgtgtacggcagatgccccggggagatggcatgttcacacggggcagcactaggcagagtggagggtagggtctacacccctccactcctcagcaacagagccctggacactgggtgtgtccttcagactgtccctggcgtctccagcactcctgtggcctcaggacggaatgatggaggtgaaatgaacagaaggaaggttgggggaaagcgtatcccagctatgggcagggggtcctggggtgggcaggatttggggcggctgggcctggggctggatagggccgcgggagaggggaggcctgtgctctcacagctgggagctggctcaggactctcagatcttctctttgtggcctgtcatccctcctacctgcctgtccacaggcccacactgagtgagttccatgggagggaggctcaccctcaggggccttcaggagatgggacctctggcccggcagccaacggatgctgaggggtgcccaccatgtgcagggacagctggggtgatgtcttggagccctgtgaggtcctggggccgcccaggcagtcacaccccgccctgcaccccagggtgcaggctcccggggtgacacagtgctgggacggcacagggccgcgtcctgaggagagggcggagccccgaggctgagctgtgccttgcctcacaggttgtgcagcctgactctgaagaagctggtggtcttcaaggagctggagaaggagctgatctccgtggtgatcgctgtcaagatgcaggtgaggccgcttgtgaccccggctgtggctgggtgctgtgtaggctttccatgtgcctgggagacgagtcaggcggtgcgctactgtggggccttgtgccaaaacagcgggcagcccatgccatctccgggagcccggggggctgggaatgacaggatgctcctgggtccagtcctgtcccgcacaagggaggcaggcccggccttctgggatgtggaggtcacatgcatggggccttcccagggcagagctgccctcgagtcacctcacagtgatggacgggccccaagcacctggagccagggcttccctgctgcactcagcacccacttcctgcccactttttgtggggtggagggcgtcggtgggagaggggagcagggcactctgggaggcgagggcctagccagaactcccagcccctggtgccagggcctctctcctgaccctagtgggtcctgtgacctctcgaaggctttgaacaagtagcggttccagaggggtcatgctggtgtcttccccatgcctggcccaggccccgccccctccttggggtagagctgccatgacccttgcagcatggcctttgcccagtggcccagacagggaggtgtccccgccaactgtcagggccacccctgccctttcagggtcatacggttccaggtgtgtggcctgtatagggccaccgccagcgggctctccctagccggcaccactcatgggcaagtctcacccatgtcctcagcatacaggagtgtccttctgtgtggccgtccagcgtgacagggtggggtctcagtggctgttgtgctcctgaccccagcccatcagctcctcgaggatggggccctgcccttggagcccatgtccaaggccccacacaggtccctgcagctggccggattcttgacacctgctgtggctctgacacggggtctccgggtctccccgacctgcagagtagcacctgagcctcggccagtgtggctgaggtcaccagccaagcactgggtcttgagtgcgaggaggcctgaggcttgttgtctgtcccagtcaattgccactatgtgaaacctactgcatcttaaataaacgtctggagaaacccttttcctcgctgaacatgctcgtggattagcagcagcctacatctgcggcgtgtgctggtggccaggttccccgggtggtggggccttgccccaggaacttccaggagcgtgtggctaatagcaggaccccaagaacttccaggagtgcgtggctaatgcaggacccggagaacttccaggagagcgtggctaatagcaggaccccgagaacttccaggagagcgtggctaatgcaggaccccgagaacttccaggagagcgtggctaatagcaggaccccgagaacttccgggagcgcgtggctaatagcaggaccccgagaacttccgggagcgcgtggctaatagcaggaccccaagaacttccaggagtgcgtggctgatagcaggatggaagcgtctctccgcctgtcctgcccatgggtgtggccatgcccagggtgcccagtacctgctgcagtctggctgcgggtcgtccctggggaacagggagctctctgtgggccattgccaccaggccgtgaggctgtgtctggacctcttggcttggggggcaggggtcagggtctcattgggtcttcagagcaatgcagaaaggcatgaaggcaagagtcgacccctcactgacttctgagtctggtgctgttgacctctaacctctggcatggggccccaccccacactgaccctgttccttggccccattccttcctctgcctgtctctggtcctgccccagcctgtgtcttgaccgagagcttggccccagggcccctcagagccccacctctccagcccctctgtgtagcgcatggactggctgcccatgccctccctgcccaccccagctcagcagccacgtggcccttggcctcccttgatcaccccagctcctcatctgcttctcttggggtgtcctctccgcccaggccccctgtgggggaagcagccagcctggccccgcagccccacctgcccctcagccttctctggcgtgcaccttcgcctcactggctggtggcacacactgtccttttcccgacacagctgggtccctgcaggtcctctgaggggggaatgctaagagggacccgacgcagagcacatttgcagggaaacatctctgaagggtcaaggggaggagcagggagagtccagaccacaacgcaggggcagctggggagaggagaggggacaggagggctggccgaggagagccgcgctgcctcttgccacgctgcacgtgaggccccagcacaaggggaggaccagagtccgccatggacgtctcatggagcccgagtacggccatgcgggccgcccgcacctgtcctgaggccccgctgctcccacccgaacctgggctggccccgggctcccgttgtctgtcctggacccccgcccgccctccagccacctggcacctctcatccactgtgtcccgcgcgccggcctccgggaaccttgtgcctgggaccccgcagcggctgcttgtttctcggggcacgaggtccccaagctcatccttgttgggatggtcccatttaaaacagcactgcgataagcacgttcaatccattaggaatctattttgatataaagtttgcggttggggtcctgttgtctttcacgcaaatgactcgttatccatttagcaggtgcgtgtgatgtctcctgctggcctgaagctcactgggtatgaactgtgttttcaggtgctcatgcatttcctgcacctacatctaggcttctactaccctcatttttgtgacagcatctccgtattttaagtattgtatctctgtatgttttactttctgagaggaccagtcaggcctgatcattcttctttttagaaaatgctttaggccaggtgcagtggctcatgcctaatcccagcactgtgggaggccgaggagggtggattgcttgaactcaggagttggagaccagtctgggcaacatgactaatccttgtctcttaacaaaatacaaaaattattgtatatttttttgtggtggtacatgcctgtagtcccaggtgctagggaggctgaggctggaggattgcctgagcctaggaggtcaaggctgtagtgagttgagatcgagccactgccccacagcctgggtgacagagaccctgtctcaaaaaataaaaacaaaaaataaaaaaatgctttaagccaagcatggaggcacatgcctgtaaggctgagctacttaggaggctgaggcaggaggattgcttgagcccgggagctcaagtccagcctgagcaacacagcgagacctgtctctcaaaaccaaaaccagaagaggcttggtgcctccagatttgttctgccagacagacttgggcagcgcagtcaggtgctgctgcacctggccgtggaatctgttttgtgatcgcgttaacttcagcaggagccgctcctggtttctctctcatgtcttagggcagattcctggaggtggaacctgtgggccgaagggtctccatgtttttaaggttcttgggaaagatgccagggcacctctgagaattaccccagcctgtgcctaccacccccagactgcagggctgcaatcctgccagttttagagtgcaggagtcacggtgtctttgcctggtttcctgctgatatgcagtcctttgagctagaacaggtcttgcttaatcacagggctccaaacgaatcctgcggtcccatgagattgtgctgccccccagtggacaagtggagacagacctggccctgaccttctccttgcaggtgagtctttcaccagtggtgacgacaccctcatcactgtcccctggggagacgggcccccctcatcactgtcccctggggagacgggcccccctcatcactgtcccctggggtgatgggcccccctcatcagtgtcccctggggagacgggcacgcctcatcaccgtcccctggggagacgggcacccctcatcaccgtcccctggggcgacgggccccgtcatccctgtcccctggggtgacgggcccccccatcactatcccctggggtgacgggcacccccatcactgtaccctggggagacaggccctccccatcactgttccctggggagacgggcccccccatcactgtcccctggggagacgggcccccccatcagtgtcccctggggagacgggcacgcctcatcactgtcccctggggtgacgggccccctcatcactgtcccctggggagatgggcccccctcatcagtgtcccctggggagacgggcacccctcatcactgtcccctggggtgacgggccccctcatcactgtcccctggggagacgggcacccccatcactgtcccctggggagacgggcacccccatcactgtcccctggggtgacaggccccccccatcactgtcccctggggtgacgggcaccccctcatcactgtcccctggggagacgggcacccccatcactgtcccctggggtgacgggcccccccaatcactgtcccctggggtgatgggcaccccctcatcactgtcccctggggagacgggcacccccatcgctgtcccctggggtgacgggcccccccatcactgtcccctggggtgatgggccccctcgtcactgtcccctggggagacgggcgccctcatcactgtcccctggggtgatggccccccctcatcactgtcccctggggtgacggccccccctcatcactgtcccctggggtgatgggccccctcatcactgtcccctggggtgagagcatttgtctcatcattgccatcagtgtcctgcgttactgcagatcttctgttgattatggtttattcttaaatgattagaagatttgtatttgtttattaggttgagtttttctttgttttttctttgttttttgtttgtttgtttgtttttgagatggagtctctccttgtcacccaggctggtgcagtcttggctcactgcaacctccacctcccgagttcaagcgattctcctgcttcagcctcccgagcagctgggattacaggcatgtgccaccacgcccggctatttttcgtatctttagttgagacggggtttcaccatgtcggccaggctggtctcgaactcctgactgcatgatctgcctgcctcggcctctcaaagtgctgggattacaggcgtgggacaccatgcccagcctagtttttcattccttatctatgataaagagaatataaggccgggtgtggtggctcatgcctgtaatcccagcacttcgggaggccgaggtaggtggcaggagaatcgcttgaacccgggaggtggaggttggttgcagtgagctgagatcatgccatagcactccagcctgggggacagagtgagactccatctcaaaaaaaagagagaatataataacgagggcaaaaaaacacttactgagtcaaggctattttgctcttctatttaaaaagataggggaaactcagagttcacaagcaatcccagctcttcgggaggctgaggcaggaggattgcttgaacccaggaggtggaggtgacagtgagcccggctaatttttgtatttttgtagagatggggttttgccatgttggctagggtggtctcgaactccctacctcaggtgatccgcccagcttggcctcccaaagtgccgggattacaggtgtgagccaccgcgcctggcccaatgctccatggttcagtgggttttgataggcatgctcaggcatgtcagcaccaccgcagttagggtggtgaacagccccattttcccctaagtatttaaactgatttttatttgtgaactctgagtgtctaagagatacctgtgaacatcagcttgctggagccctgctggacagggagcctgtggtgagacgtgcaggcgagttgggtgaacagggggcctcggagggagagccctccccgccctgtgtgcccctcgcggaaaagcgtcctgggtcccaccttgctgattgcctcaggcacatgagccgccacactgtttccgagtgtccacaggcgcgctcggccatcccggacactgcagcacatagtccttgtccacctgccatggctgttagcgtggcgcggagccctcagggcctgagctctggcgactggctcactcttgattgtgttgggtaaaggatgggctctggggaccggcatgccactgggatgaacttgggggcccgtctgtgggtgcccttccgatctcatgggcagcaggttggcctggtcgcaggctgcagggtggctgggccgtcagaggccgtgatgctgcctggggccccggtgcaccctcagctgccactcgcacttgtgcccacagtatcctcacttcttgaagagggaaggcaacaagcttcagatcatgctgcagcgcagaaagcgctacaagaacagaaccatcctgggctacaagacgctggccgcgggctccatcagcatggctgaggtgagtgctccgtctggcgtggcctgcgtcgggctggccacctgggtgccagagcattcgcccgtgggagatggagatgtctctcccgggtccagatgtccagggatcaggtgaaaatgatgagaggagcctgggcggccgggctccgccataagggccaggtgcggccccaggtggtgcttcctctctgaccttcccttgccgcctagcatggctccccgcatgcctgcagccgcgcgcactcccctctaacgagcctgtcctgcccttcagtggaggctgggttttgggtcaggctgctctggagtccttcccatggaggaatcgctgctgtccccacaccacgggtgcgtcctgtgatgggttcgtgtctgcatcctgctcagcacgtgctctggcccaggattggctgagcaggagcaggacaggtgtcagttctgtgaaggggctagcgacaatacccgagcagggcgggggcagcacccagaggtcagaggggtggctggagttccctggaggggaaagaaggggaagtacctcaaaaggaaaagaaacagccaagcagcagcccaccttgctccagagaacccagcgttccaaggaggctgcagtagggcgtgggggcctgggagaagacaccccaggctgaggcctcggactttctcatggaccctttcggggctgcaagattggctctgggagaaggggcagcccagggccccagaccagtttgtctcttttgcttcagaactttccccatcgtggggttgtgttcaggggtccaggggctgcgggcgtgagtggtgcttggggcatgtgaagctgggttgctgcctgcctggggcctgggaaggtcagccagcgcagcccctcattgggagccggagatgccagagccccccagcccctcttcttcccactttgtccccctgctcctggggcttggggctgggacagtgggggtgcccacttgtagctggttcccccacacccccaggcccagcctgcaggcctcctgtctcccaggtcaagcgctaggtcccccagatcctcacacacccccacttacgcatccaggacaagtgccaagtactactctgggctcagccctccctgctaccccaggagatgggagcgtggagggtacaggaagcagcagtggcgtcccgaggcctcgcttctccgtgccgccgcagggcctcagacaagctttgcagtcttcccgattccttcggcaaaccacggacagcacgggtggaccgggcctccaggctgcacttcccagggccctgggacccctctggtggcctggagctgcccatcatcccagcctccctcctgcaggctgagcgatgggtgaacaggtagctcagggatgctctctgggctgtgagagcctcctgggagccaccgcttgcttcctgtggagcaggagggtccaggcactgtggggaggtcatgcaggctctgtttcccattagccatgcaggcgaggtcctgctgatccctgccggtccctgtgtttcccattagccatgcaggcgaggtcctgctgatccctgccggtccctgtgtttcccattagccatgcaggcgaggtcctgctgatccctgccggtccctgtgtttcccattagccatgcaggcgatgtcctgctgatccctgccggtccctgtgtttcccattagccattcaggcgatgtcctgctgatccctgctggtccctgtgtttcccattagccatgcaggcgatgtcctgctgatccctgccggtccctgtgtttcccattagccatgcaggcgatgtcctgctgatccctgctggtccctgtgtagccatgcaggtgatgtcctgctgatccctgccggtccctgtgagctcctgccccaggctgctccgcccacatctctcagtctgcaccccagtgccccaggcggctcctcccagcccctctcagcactggtgcttctgtgtttgacgtccttgccctgaatgctggcctctgctcccaggcccctccctcacctgtcctcccagccttgggctgtcccctcctgatccccggggagaggctggagcaaccttcccccaccccaggtcacaccagccacatcgtctgctgcttgaaatcccatcatctgttcttcactcttggcagaaaagccccacccctggatgtagttccagtgccctgcccctgagcctgtggcccccaccccaaggctccctcgccctgcacctgtggcttccaaagccgaggtcatctgactgctcctcgctctcccctccagcatctcctccaggccctcggggcatccttccaccttccactggcagcctggtcccagaacctagttgggtcctcccatgtgtccccgagcaccagggcggttcatgggctccctgtgtcctgccaccttttggggctggttcccacctgtgagcgttgctggcttgttgagagtatgagcacgggagattgcggaggcgggacagccccgagggcacagacggacacaggtggcagaggtggggggctctcaccagctgggctcaggcagctgtgccatgggggcttgctggctccgagactgcacgcctgagacgggggtgagggcatgggtgctgccatagggactgtcgtgagagtggggtgtcggtgaggctggcgccatgcatttgagagtagtgctcggcggtggggaagggtccttgagggcacagggtggggtgaggcgggctgttgggcggactcgaggccagggctgagagtgtggtgggagaggatgtggggggcacctgcccaggacctccaggctgtggggagaccaggaggcgatggctgtggggacacaggtgtcatctcccttcaaatgggtgcacacgcagggggcaggaggggctgggagcagcctgggcccctgccacaccatagctctgccctcacctggcactcattctgtgtgagctgaggcccagagccctggacttactctgaggctgaggaagtggagtccaaggtggcccagggtaggggccgggcctcatgggtgccaggagctggacgccggcgtggggtggcttaggtctgcaggctgaccagcagttctggctgggaccatcaggagtgaccgcagccccagggcctgctgggcacgcgcctctgcctgccacttctcaggaagcttgagctgactgcaggtggtccctctcagaggcagctccgcagaggcaggtgtgcggtgggggcagacgtggggccttctcctgtggtgtggctctcagaactcaccccagcacccgtagagggagtgtgtaggggtgggcgttcgtgtggccagaccaccctggggctgcagcctgggagacgcaggcatgccagctggtggccattgtctgaggctggggcctgtgggctccccgacaagacaggaaggttgacagacccatgaccaggcgaaggggtgacctgggagtgcggtggtggctgagggagcagccatgcttctttgcacagccggactcctcttgtggcctcgccacaagctgcacatgccactggggccaggtccagcccaaggggacctgtgaggggcgggcggctcatggtgggacacaggaagacctcagggtaaggacagcgcgggagcgtcaccctgaccgtttgcatgctggattccctttagtttctctctatgagtgtctgcacagccacaggctgctgatgacagcccagtcaggtgtgggctgcatatcaatgggtggccccgtgagaatatgatggcactggacacttcctatctcctgatgacatggtagccatcgtaacaccatagcacagttactttattcctgtgtgaactcagtgtggcccaggtgtccagggcctggtcacacacacgtccatccctacacggcggtgcatggcgacctcccaggccttcgcatccacacacacgtccacccctacgcggcggtgcgtggtgacctcccaggccttcgcattactcactcacccaccagcttgtccagagccacctccagccccgcaggctctgccatcgtcagtgccctattcacaggcaccacttaatgtcttttatactttatttttactgtgcttttttttttttgctttttatttttaaatttttttcgtgatgtggtttcacttttatagtgcagtggcgcgatctcagttcactgcaacctccacctcccgggttcaagtgattctccttcctccgcctcccgagtggttgggattacaggtgctcatcaccacacccaactaatttttttatttttagtggagacagggtttcaccctgttgtccaggctggtcttgaactcctgacctcaagtgatctgtctatctgggcctcccaaagtgttggtatttctttcttttttttttttttttttttttgagacagaatctcgctctgtcgcccaggctggagtgcagtgccgcaatctcagctcactgcaacctccacctcccaggttcacgccattctcctgcctcagcctcccgagtagctgggactacaggcgcccgccactacgcctggctaattttctgtatttttagtagagacggggtttcaccgtgttagccaagatggtctcgatctcctgacctcgcgatccgcccaccttggtctcccaaagtgctgggattacaggcgtgagccactgtacccggccaagtgttggtatttcaagcatgagccaccgtgcccagcctactttttctgtgtttaaatgtgtttagacacataaatacttaccatctgtaacaattgcctacagtattcagtacagtaacatgctttacaggtctgtggcctaggagcaggaggctgtctctcatataggctgaccttgaagatattgtgtgttcagttctaggccaccccaataaaaacggatattgaaataaagtgagtcacacaaatttcgtggtttttcagtgcatataaaagttatgtttacactgtactgtagtctgttaagtgtgcaatagcattacgtcaaaaaatatatacatacattaattttaaaatattgctaaagctgggtgcggtggctcatgcctgtaatcccagcactttgggaggccaaggcgggcgtatcacctgaggtcaggtgttcgaaaccagcctggccaatatggtgaaatgtcgtctctactaaaaatacaaaaaaaaattagccgggcgtcgtggctcacacctgtaatcccagctactagggaggggaggcaggagaatcactttaacccgggaggcggaggttgcagtgagccgagatcacgccactgcattctagcctgggtgacagagtaagacttcctctcaaaaaaaaaaaaaaaagaaaagaaaaagctaacaatcatctgagccttcggggagttgtaaccctttggctggtgggggtccttagtgtgggtgggtgctgaccggtcagagtgttggttgctgaaggctagggtgcctgtggcaatttcttaaataaaacaagaaagaagtttcctgcatacttgactcttcttttcgcagaatagttccctgtcgcatgcggtgctgtttggtaccatgttacccaccattatttcagaattggggtcagtcctctcaaaccccgttgctgcgttactaaccgagacggtggactctcccaagtcctgtgttgtcactccgcagtgttcacagcatcctcaccaggagcagattccatcttaagaaaccactttcgttgctcatccatgagaagccacttcttatcagctgaagtttcttcatgagactgcagcaattcagtcagtcctcaggctctgcttctaatcccagtcctcttgctatttccaccacatgtgcacttccttcctgcactgaagccttgagccctcaaagtcatccacgagagagttggaatccacttctcccaaattcctgtcaatgctgatatctcaactttttcccatgaatcacagatgttcttcatggcatcaagaatggtgaatccaggccacgcgcagtggctcacacctgtcatcccagcactttgggaggccaaggtgggcggatcatttgaggtcaggagttctaaaccagcctggccaatatggtgaaacgctgtctctgctaaaaatacaaaaaaagaaaaaaaggctgggcacggtggctcacacctgtaatcccagcactttggcaggccagggcgggtggattacctgaggtcaggagtttgagaccagcctggccaacatggtgaaaccttgtctctactaaaagtacaacaattagccaggtgtggtagaggacacctgtaattccagctactcagtaggctgagacagaagaatcggttgaacctgggaggcggaggttgcagtgagctgagattgcaccagtgcattccagcctgggtgacaagagtgagactccgtctcaaaacaaacaaacaaacaaaaaaattagtgggccgggtgcaatggctcacgccggtaatcccagcactttgggaggccaaggcgggcaggtcacctgaggtcgggagctcgagaccagcctgaccaacatggagaaaccccgtctctactaaaaatacaaaattagctgggtgtggtggcacatgcctgtaattccagctactcaggaggctgaggcaggagaatcgcttgaacccaggaggcggaaattgcaatgagccaagatcacgacattgcactccagcctgggcgccaagagtgagacttcatctcaaacaaacaaacaaaaaaaacgaattagtggagtgtggtggcaggcacctaaagtcccagctactcgggaggctgaggcaggagaattgcttgaacctgggaagtggaggttgtagtgagcgagatcgcaccattgcactccagcctgggcaacaagagttagaatctgtctcaaaaaaaaagaatgggccaggtgtggtggctcacgcctgtcatcccagcactttgggaggccacggtgggcggatcacgaggtcaggagatcaagaccatcctggctaacacagtgaaacaccgtctctactgaaaatataaaaaattagctgggcgtggtggcgggcgcctgtagtcccagctactcgggaggctgaggcaggagaatggtgtgaacctggaggtggagcttgcagtgagccgagatcgcgccactgcactccagcctgggcgacagagcgagactccgtctcaaaaaaaaaaaaaagaaaagaaaaaaaaagaatggtgagtcatttccagggggtttccaatttaccttgcccagatccatcagaggaatcactgtctatggcagctatagccttatgaatgaaatacattttttttaaataataagacttgaggccaggcgcagtggctcacacctgtaatcccagcactttgggaggtcaaggcaggtggatcatctgaggtcaggagttcaagaccagcctgaccaacatgttgaaatgccatctctgctaaaaatataaaaattagccaggcgtggtggcgggcccctgtaatcccagctactcaggaggctgaggcaggagaatcgcttgaacctgggaggcagaggttgtagtgagccaagatcgcgtcattgcactccagcctgggcaacagagcgaaactccaactcaaataataataagacttgaaagttgaaatgactccttgatgcatgggctgcctgatggatgtcgtgtgagcagccatgaaaacaacattcgtctcctgcgagtctccagcagagctcttgggtgaccaggtcatgtcaatgagcagtcatattttgaaaggaaccttttttttcccaagcaataggtctcatagtgggcttaaaacattcagccaattgtgctgtaaacagatgtgctgtcatccaggctttgttgttccattttcagaacacagacagtcgactttgcataattcttaagggccctaggatttcaggaatggtaaatgagcactggcttcaacttaaagtcaccagctgccttcactcctaacaagagaggcagcctgtcctttgaagctttgaggccaggcatcgacttctcctctctagctatgaaagtcctagatggcatcttcttccaatggaaggctgtgtcttctacgttgaaaatctgttgtttagtgttagccaccttcgtcaagatctgaactagaccttctagagaactcgctgcagcttctccgtcagcacttgccgcttcaccttgcatttctgttatggagacggctgctttactaaaacctcatgaaccaacttctgccagctccaaacttcttctgcagcctcctcgcctctctcagccttcacagaggtgaagggagtcagggccttgctccggatgaggctttggcttaaaggagtgttgtctggttcaatcttcatcccggccactcactctctccacaccgtcactgaggctgctctgctgattctccttcctgtgttcgctggagcagcgattttcctttccctcaggagctttctctttgcattcactgcttggtgatttagtataaggggcctcgccctcaccctgtctcggctctgacgtgccttcttcactaaactcagtcatttctaggttctcattgaaagagatgtgcaacccctcctttcacttgaacacttaggggcccgtagagttagtaattggcctaatttccatattattgtgtctcggaagagagaggccacaggagagacagacatgggaatggccggtgggctgagcagtcagacgcacacacctactgattaagttcactgtcttacatgggtgatgttcgtggtgccccagagcagttgtgatagtcacaccgtagctcactgatcacagatcaccatacagatataataatagtgaagaagtttgaaatattgggagaattaccaaaatgtgacacagacaccaagtgaacacgtgctgttggaaaagtggcgctgatagacttgcttgatgcagggttgccaaaagccttcactgtaaaaaacagaagatcagcaaagtgcagcagagcagagtgagggctgcagcccgggtgcgcggtgggcggcggcctgcgggtgtggtgggcgtcccgggtgcgcggtgggcggcggcccgggggtgtggtgggcggtgtcccgggtgcacggtgggcgtcccgggtgcgcggtgggcggtgtcccgggtgcgcggtgggcggtgtcccgggtgcgcggtgggcggcgtcccgggtgcgcggtgggcggcgtcccgggtgcgcggtgggtggcggcccgggtgcgcggtgggcggtggcctgggtgcgcggtgggcggcaccatccaggcttgctgcgatgttggcaagaggacgaggtctcctcaccatgcatgtctcagaacatacctctgtcgttacgtggtgcatgactgtttttgtaaaatttttattgtagtatttgtacaattaagtgtgacatcctgagcaattttcttttctttttttttttttttttttgagacggggtcttactttgccacccaggctggagtgcagtggtgtgatcttggctcactgcagcctcaagcccctgggcccaagcagtcctcccacctcagtcctcaagtagctgggactacaggtgcgcaccaccatgcccagctaattttttatactttttgtagagataagagtttcgccatgttgcccaggctggtctcaaactcctgagctcaagccatccacctgcctcaacctcccaaagtgttaggattacaggcgtgaaccattatgcccggcctcaattttcctagtcactaaaatctatttgaaaatggaagagggaggagcctgtcagggtcaggggtggagggagctgggccctggggccaccctccctggtgaggcagctccagccctttgctgaggattgcagagcatccacagagcatctgctggactaacccgggagggtggtctcagggtcagcaggggcaggagtgggaatggccacagtccaggacagtgacctgccggccagcatcaccccaggggagtgcccagctcaggggtggctggccccttggcaggaggacgcacgccccaaggagcactgtcaggaggagaggaacatgcagcctggagtgtcggggcctgggacttccagggcctgcagatatcaaaatagtgttcacatataggtcgaccacaggctgagtggagcgggggctaatcaacaacccgcccctggcccgctgcgggcccagcagagcattcccactacagccagctccagggatcccggcaaaagcatctttgataagaggccccattccttcctgccctcccacctgaaggaggaagcgagcagggttttcttaggagaaaaagggcccagacccctctgagccccgtggaggttggtatgagcaggtgcagcaccacctgagccccaccttgattcctccgggaccccagcccggcagccccctcccctctgagctcattttactgggatccccagcaagggctcagcatttctgaccgagggcttctgagcttccaggttctcacccctgtgtgacactgagaccctgccacatcagatgccactctgagaaggcgactcagggtgctgggggcctggacaacagcagcctccaagtacgtgaagctgcgtgtgccccggcgagttgtgggcacgagggcgtcagcagtgggtgcgagtgttggcagaagctgccagctgcccttcgtcattttctgaaatgaagatgagggcaaatgtaaacttttaaacatttttttaccttgattaattgaagaattagcagcccaaatcaggaccccacaatcaaaataaatctggtcggctgggcgtggtggctcacgcctgtaatcccagcactttgggaggccgaggcaggcagatcatttgaggtcaggagtttgagaccatcctggccaacatggtgaaactgtttctactaaaaatacaaaacttagctgggcgtgctggcagatgcctgtaatcccaggtacttgggaagctgaggcaggagaatcacttgaacccaggaggcggaggttgcagtgagccaagatcgcaccattgcacaccagcctgggccacagaatgagactccgtctcaaaaaagtaataaataaataaatctggtctataaaatcctaacatctggatgtgaaccgatagccccaaaaggcggcttctagagcacagctggccccaaggctgtgagtgtctgagagttgtcgtcatggcgtgtggttctgaggctggcgtggggcacggcggggctgtgcctgggtacaggtcgtggctgcaggaggggccggggcttgttctgcagctccgtggtttgagtgcctcacaacagaggagctggacctggcctgtgagccaggcctggtgggtgtctcctgctgctggagattccggcctggctgagagtgctgggctcctccttggtcccccacagacactggtccctgggcattggctcctgtgggttgggcagccggcttcacacactgctttgctgctgctgagctcttgggtgggtggagggtggaggcagggttggagcagggggccaggatcttcctgggtggcactgcatggacagcagtcgtgcctgagatcaggagggccgcggacacccctgtctgtccatctcagtccctcgtgactgtgcctggcactggcctctccagcacagcccagtgccctctgcttatggcccgttcgtgaaagctcccacgtgttcctctcgtctgtccgcctggctcctgtgtcctcctctcgtatctgtcccctctccccagtggccacgtttcctgtccactggatgctccctgccctgtggctgccctgctgagggtcccccttgctgtcactgagagagaaagcccttcagaaaccccagcccacacatcagggcaccggggctccttcccgtcgtgctgctttctagaaccgtgcccctggcctgcaggtgatgcaacacccgtctgaaggtggccaggtgctgagcctctgcagcagcatcaaggaggcccccgtcaaggcggccgagatctggatcgcctccctgtccagccagcccattgaccacgaagacagcaccatgcaggccggccccaaggccaagtccacgggtgagtgtggtgccagcccgctcctgcccctgctgtggggaggccctgccttccagccatggcacatcgggtggcagaaactgtccagcctggcttaaggagttgggggtccggagcacgtgtcagttgctctcctgtctggaagccacagcagaggtgcgcgctgttgtagggtccgggctgccacaggtccctgttctgcccccgtggctgcagctccttggtcaagaggcctgagtcctgagtgtcctcaaaaaggaggtgtggggtcgcactgtgatgcccttgctggtctgggtgcagggcccgccatgggcaggtgccacagctgccgccaccccagtggggtcaccagggcctcccctactcctcaggcgggggagacccagtcggtgcaaatccaggctgaaatgccagctggcaggaggggccgtggaggccggagcagttcatgtggccccctttgccctccctgcccctccccacttcctgccaaccccgacctggaccgttgccagtggacttgggggactcgggggctcggggccacggcacctgtgtctggagcccctctgtcctgcatggatccacctcctcgctgcccccactctgtgtccagggaagcctgggggtggtcactgcctggtttcccgggtggaatctcacggcaccctcccttctgtctgttcattccgcagataactactccgaggaggagtatgagagcttctcctccgagcaggaggccagtgacgacgccgtgcaggggcaggtgacctggggccggggctccgcgccctctcctggctcacaccgggtgtcctggggtctgtggggtcctcaccagctgtcaccagggcctcgtgagggtgggtgagccacgggcctggcccctggttggccgcccatctctcgtctcccgaccccaggggcccgagtttatgctcaggtggctctgagagtcttgggacacaggtgggctctcagtgccgggcctctcccatcgcccacgctgaggctggcagggtcctgccagcactatgcaggctgccgtggcctcagccactgcatatgtctctgcaggacttggacgaggacgactttgacgtggggaagccgaagaagcagcggagatcgattgtaagaacgacgtccatgaccagggttggtggagactgcttctatgaatgctggggaaggcgagggtcggggaggacgctgggagcctgggcgtgggggggacacgggcgtgggaagtgagatctcaccccaggtcacagcagcatgtcccgtggcagaccccctgattgccagtctcctgccgggtgccactgtctcccctgcctcgccacatctcctggctttagccttgtgtggccgctaggctcagtgggccctgagcaaggctgggaggctgcctcgctgccaggctcactccatgtgcagaaactccgggaggccatcctcccttttgtcccgtcaggtgcccacatacacctgagtgggctggttcccccatttttgtttgggatctggcctacctacctccacggtccccaggagcttggcagggctgttcagcattttttccctgaggaaagctcaggcagctctttcctcagaggccgtgtccggcactggcacagagggtccaccgcctggcgcctggacaccccaaggacaggcacggttccagggaggccagcgcaggtgggcggggagctctgtgcctggtgctgacaagggacatgggcacagcccagcccggacaccgccgcctcctctggcagcattcaagggggcgctgtgggcagacggtgccagggacgggcaagctgctcccaaagtggtgaagctgtgtcttgctggcctggagagcagcccccgctgtgcagaacaccagcttgagcctccattccagggcccccttgggcccaactgttgtgaagggagggcgtgggctgcctttgtagggttggtccccgagagggtggctgagggtcccgctcacccagtggctggagccgaggttctgcagtccagggtggcacgaggcacccacggggctcaggctcttggagcacgccccaccccacactcgcccacctgcccaccccacgtgggtgcccagcaccttccttctggggtcggccagggcctttcctgggagggggtgctgagggaagggccccgtgagcctgggaagggctgcagaggcttctggaagaaccatggagtccgcacacgcctccccgggtcccccttggccaggaatggaactgtcagacctcaggcctgttgggaagcctctgggagccacgagcgaatccatcagcgtggctggtgctgaggccttgctgctctcccacggcgggcctgggtgcggcctgggcctgaggaaggggctccagcggcgggtctgcagctctggcggcggctctgactctgcaccgcctgtcttgcagcaacagaacttcaagcagaaagtggtagcgctgctgcggaggttcaaagtgtccgacgaggtgagtgcgccgcgccttctgctcgcggcccccacgcctgcaacagcacctggtcgggaggaggcctctggggtctgtctccgggccacctctggttctgccgctcaccgtctgcacggccccgccagcatcgcacagtctgcgaggcgcagtgacagtggcactgcctcccgggctccaggtcacccgctgggtctctgctgaagtagaagtcgtgaataccctggaagtcggaaagtcattttcagggggatgtaaccattagtttgtgtgtttttttttttataaatagactttagtttttagagcagttttaggtttacagcaaaattgagcagaaagttcagagttcccatggacccctccccacctgacagccccccactattgacatgggccccccctccccacctgacagccccccactactgacattccatggatttttaatgttcatcttttagcttttctctaatctctgaattttctacaatgagcttgtataattttcataccgaaaagaaaaacatggctgggctcagtggctcatgcctgtaatcccagcactttgggaggccaaggcaggcagatcacttgggcccaggagtttgagaccagcctgggcaacatagtgaaaccccatctctacaataaaatacaaaaattagctgtgggtggtggtgtgcacctgtagtcccagctacttgggaggaaacctagtaggccaaggctgcagtgagtggagattgagccactgcacttcagcctgggcaacagagcgagaccctgtctcaaaagaaaaaacttcaaatctcggctcactgcaacctctgcctcccaggttcaacagggtttcaccctgttggccaggctggtcttgaactcctggcctcaagtgatctgcctgcctctgcctcccaaagtggtgggattacaggcgtgagccaccgcgcccagcctttgttgtttctttaacgtcagaagaaaaacgtgcctgggttcaggacctgaagtggagaggtggcgtttaagcgtctcagccttgaagcagggttgtcacccgtcggcctgagagcacactgcctgtagatggcgctgtgtcctaacatactcgggatgcatccagctcagcccctggggcacacactcagcgaggctgtcaggtccatgtgccgaaacaggtgctttgtggcccggtggggcaggcagcatttctgggaacagcgtaacatcaccaactggccgcagaggaagggcagctccgccactgggatggtcatcgggcccctgtgtcttttggtttgcatcttggattggaacattcccaagtgcagctgaagatgggacttagccaagtcggctccctggcctggggcttccttgagccctgctgagcgcctgtgggttcaggggtgggtgttcttggttgaatcttgaccgtggggttctgcactcacctgggcaactgaactgagtcccagaatgcatttcacttacacagattatggttctgagactcacaacccaaactgtgaaaagatgggccaacgtcacagacgctgttcagggagaggacatcgttttcatagggataattgcacagcgttgtgtgaaattcatgcaggtcaacacagtactttaatggagtgatgggatctctttccgtattttccacccatcactccctttcctgaaaagaccagaccatctccgccacagctctgaacctgtgtcttggccactaggagtgccacacctggcactgccccctgcccaggacttcacagcaaccctcagggggcaggagatgcacagtgagacgaggtcaccgcctggattacagccatctgagattgttcatgctgctataacaaaatactttagactgggaaattaataaacaaccaaagtgtatttctcgcagttccggaggctgtgagtccaagatcaaggtgccagtagactcggtgtcttgagggcccgtttcccatagagggcaccttctgtgtgttgtgtggtgagagggcctgacaagctccctcaagcctccctcatcagggccctgagcctattcagcgggcagagctctcgggccctaaccacctgttagaggccccacttcctaattctagcaccttggtggtcaggtttcagtgtaggaattttgggggtacaaacgttcacagcccccaggctgaccacagagcactggcatccaggctgccctgtgcccaggtgccacacagtgggtctggtgaggaggagagcagggctctgcttgggacccatcctgtgaggaggaaccagagtgaagtctgttccttacagccctcagcttcagctcacagcgaaagcgtccgctgagggctgccttctgaatttttcattgtaaaaggtggcacacctggatagtcagttgattttcaacaagggtgccaagttcattggagaaaatatcttttcgcaaaaaaactgaggcttgacaatgcacaccatgtgcagaattcagcttgactggatcatattcctaaatgtaaaagcctaaaatttaaattacctagattctaagccttaaaaaatatgaacttaaatcctgcactaatgccactgaactgtacacctaaaaatagataaaatggtaaatattatgttttatatatttttaacacaataaaaaaagtagaaatttgctttctgaaaggtactgttaaaagaatgaaaagatggccaggtgcggtggctcacgcctgtaatcccagcactttgggaggccgaggcagtacgaggtcaggagatcgagaccatcctggctaacatggtgaaaccccatctctactaaaaatacaaaaaaattagctgggcgtggtggcaggcgactgtagtcccagctacttgggaggcagaggcaggagaatgatgtgaaaccaggaggcagagcttgcagtaagccaagatggggccactgcactccagcctgggtgacagagcgagactccgtctcaaaaaaaaaagaaaaaagccacaggttgacagaaaatatttgcaaataacatacctggtaaagatttgtatccaatagatatattaaaaactttcaaaacccaataagaaaagcaacctgatttttaaaatgagtaagactcatacagtgaaactatgaaacattttttaaagaaagaagatataaataagtggaaagatgtcatatgttcatgaattggaaaacttagtcttgttaaggtggcaataatccctaaattgatgtacaaattcaacaaattcaagtgcgtatcagattcccagctgtgtttttgtagaaattgaccagctaaaatttatgtgtaaatgccagagactcagggcagacagaacagtcttgaagaaagaagacttatacttcccaatttcaaaatgtactacaaaaccacagtagtaatcctgaccatgtggggctggcccagggacaggcatggagatcagtggaatggaggtgatagtccagaagtgaacccttccatttatgggcaagtgatggtcaacaaagatgtcaagatatccatgggggaagaatagtcttcaacaaaggtgctaggaccactggatatccacatgcaaaagaaggaattacagccagctgtggtggcacatgcctgtaaccccagcactctgggaggctgaggcaggcagattgcataagtccacatagtgaaatcgcatctctactaaaaatacaaaaaattggccgggcatggtggtatgcacctgtaatcccagctactcggaaggctgaggtgggagaatcacctgagcccaggaggtggaagctgcagtgagctgagatcatgccattgcactccacctgggcaaccagagtgagaccctgtctcaaaaaaaaaaaaggaatttggacccctacctcacaccatattcaagaattaactaaatggatcagctgggtgcggtggctcacgcctgtaatcccagcactttgggattagtggccgaggcttgaggctcaagtgacccggatcacttgaggtcaggagatcgaaaccagcctggctaacatagtgaaatcccgtctctactaaaaatacaaaaacaattagccaggcatcgtggcgggtgcctgtagtccctgctacctgggaggctgaagtggaagaaacacttgaacctgggaggcagaggttgcagtgagccaacattgcatcattgcactccagcctgggcgacacagcgagactctgtctcaaaaaaaaaaaaaaaaacttgaaatggatcaaatatctccatctgtgagctaagattataaagctcttagaagaaaatgggccaatcttatgaccttgggttaggcaggggtttcttagatgtgacatcaaaagcataagcaacaaaaggtaagtttttctggaccacagcaacattttacagttttgtgcaccaaatagtgccatcaagaaaaccgaacagtagaacagaagaatgttttttgcaaatcatatatgtgataaggggcttgaatccagaacacataaagaatgcttataactgaaaaataaagacacagacagtctagttaaaagctgaactgtccattgctttgagaacgatgcagcctcaggtgccacggagctggggcccgcccactcctgccctgactcgctgctgtccacttgtactgagaagtcgaccaggaagccgcctcgtggccacggcttttaaagacaccgggaggacacctctggagcccgtggagtgattccttgaattagaattaccctgaccagctgcaatgtaaaatccctggaggtgtgtgctggcttatgaggggcacggagaaaaacaatctcaaagtgaaagaaccagttctgatgcctgccaagtctttgagaatcactaagagaaacacaccttgtggtgaaggttctcagacacaggatcacttccagacgagaatccataagcagctcgtggacctgcctggtccatcctggattgtgaggctgattgctctgttggaattgagctgcgagccgcggttgacatcaccattgcagatgcttaagccaagtgttttaataaagtgattatcacttgtcagaaccaggcacagtggctcacacctgtaatcccagcactttgggggctgacgtgggaggatcacttgagcccaggaggtcgaggctgcagtgaactatgattgtgccactgcgctctaccctgggcaacaaagcaagaccctttctcaaagacaaagaacagtgaattgtccaattaaaaaatgggcagggggctgggtgtggtcgctcacacctgtaatcccagaactttgggaggccgaggcgggtggattacaaggtcaagagatcaagaccatcctggctaacacggtgaaaccccatctctactaaaaatacaaaaagtagccgggcgtggtgatgggcgcctgtagtcccagctactcaggaggctgaggccggagaatggcgtgaacccgggaggcggagcttgcagtgagccgagatcgtgccactgcactccagcctgggcaacagacagtgcgagactccatctcaaaaaaaaaaaaaaaaaaaaaatagggatctttctaaatagatttcttcaaagacacacaagtagccaataagtacacgatcatcatgatcattatcactggtcattagggaaatgtaaaccaaaccacaatgagacactacttgatccccactaggatggctggaacaaatgaaatgcaacagggtgaggtgtaacagcaggaacccacaccctgctgggggaatgtaaggtggtgtggcagccacaggaagcagttgccagacacccagcacccctgttcttcagtgttgacttcagggaggtgaacacacacatgcatggacccactcagacgttcacagcagcttcatctgtgatggtcataatgcccgtcagctggtgatctgttagactggggtccacccactcagtggcgcactgcagaaccatcagaggaagtgaataaaggaaagaggtttagttgactcacagttcagcatggctggggaggcctcaggaagctgccaatcatggcagaaggggaagcaggcaccttctttatggggcagcaggtcggagtgggtgcctgcaggggaaatacaagatgcttataaaaccatcagatctcttaagatgtgctcattatcatgagaacagcgtggaggaaaccacccccaggatccagttacctccacttgtcctgcccttggcacgtggggcttatggggattacaattcaaggtgagacttgggtggggacacagtggaacatgaagtgtgccacgctgggtggatgacgccctcctccccccgccaccgagagctgcaggccacatgattccttttgggtagcactcgggaaagggcagaatgtacaggaacagagtgagattcgcagggcctggggctgagggaggggacgcactagaggaaggcaaaggggagcctcctgggtgtggggagcactttctgtcttggttttggtggtggctgcacagtggcccacacccgtcagagctcacctgcctgcacccaggccctccgtgcaccctggcagcccagatgactgcaccagcccaggggaggtggaggaatgccacacgcaccggtacctggggaccgggggtcctcggtgatcatcccgagctccaagacagaagctggactacagccgtgctgagtggaggggtttggtggctgggtgcccgcctcctattgctcctgcagactctggggtctcgggcgcccccagtggggcaatgtgggctgctgcagggaactcacgcgtgcctggcacccgtgcaggtcctggactcggagcaggaccctgcggagcacatccccgaggcagaggaggacctggacctcctgtatgacaccctggacatggagcaccccagcgacagcggccccgacatggaggatgacgacagcgtcctcagcacccccaagccgaagctgcggtgagccctacagggcggggcggggaggaacagccatttcagatgccccggccactctgcgaccactctggcagacccatgtccagccctggagacggggtgggcagggccagctgcctcgaagcctgggaaggctctggtggctggaaggaggggtgtgcggctgcctggcaggcccaggctacggctgcactgagccaggcagctttcctttcataggccagggggtgcaagctctgggctggggaggaccgagaggggtcccccagggtgctggctgggctgggtgtggcaccccgttgtaggggatccgtctctgggggatgccctgggaactgcaggggacctccgttcactcaggtggggagtagagctcccatgctgggtgcccctccctgaggaggaggaggcagaggcaggtggggagggggagggcaggtgtctctgtggctggatgggaggaggggctggctggggtggcctggcctgggcaggaggagaggatgcagggcaggcagctctgtgcatgggtctgggtatggaggcctcggtcagctgggggcaggaaggcaagcacaccaggcagaaggcaggtgccagcctctgggcagctgctgaggagccagaggccccagtcagagtcaggaagcttggtagaccttttgctctcacacttttttaacctaaacaacacgaagaaggtggccttgctgcatgttggaggcgcggccccagttagccctgcagccacgcagcggcctcccacctcacctgccccggcctggcagccccagcccaacttgctgctccttcagttgccagcagccaccataacaggtgaccgcggatgtggccaccagaaacagcctctgttcctcctgttctggagattgccatcccgaggctgtggcctcattcttggccagggtctcgctgggctcgggtggaggtattggtggctgccctgactggggctccgaggtcatgcagtgcaggcccagcgtggtggttggtggagttcagctccgtgtggctgcgggatgggggtctggctgccctgccgcctggtggccgttggtcattcttgccttctggcaaccgtcctcgtaccctggcccagggtccctcctccaccttcggaaccagcaaggcccagtgaagtccccctcacactttgggcctccctggccttcctgcctcatctcttctgccttcagccggagaaagttttctgtctttaacggctcacgtgattccataggagacatctttgtggcccagatcctctcccatcttaaactccgtggtgttggctgtatctgcagagccctggccagctagcattcatagtttgaggagaggcgtgtgcgtctcggggctatgatcttgaatgggcacacacagcagcaagtttccacgtgggtttgtcacccagggtggagcagcagacactgctaagtcccgtctgtttttttagggggcgggggagttgtttgtttcttgagataaggccttgctctgtcagccaggctagagtgtagttgtgcagtcgtggctcactgcagcctcaaccacctgggcccaagcggttctcccacctcagcctcctcagtagctgagaccaatggcgtgcgccaccacacccagctaatttttatatttttgtagagacagggtctccctatgtttcccaggctggtctcgaactgagctcaagcgaaccacctgccttggccacccaaagtgctgacactacaggtgtgagccagtgcacctggcctcctgtcaaatttttttcacttgaaaggtcttttaagtcttattgaatctgtaggtctcccttcctcctttttcttcgtacatattatatcaaccagggatgagacattcggcctggatggcctggatcggccagatggtctgcaagggtctggtttgtctggaaaggcatgggtggcctggatcagcctggatcagcctgggtggtctggaaaggcatggatggcctggatctgcctgagtggtccggaaaggcatgggtggcctggatcagcctggatcagcctgggtggtccggaaaggcatggatggtctggataggcctggatggtcgggaagggcctgggtggtccggaaaggcatggatggcctggatctgcctgagtggtctggaaaggcctggatggtctggatttgcctgagtggtctggaaaggcatgggtggcctgcatcagtgtggatagtgtggaaaggcctgggtggtccggaaaggcctggatagtctggataggcctggatggtttggaaggacctggatgggcctgggtggtctgatctgcctggtgggtccggaagggcctgcttcatctgatgtgcccttgttgttttgtcgagcatgttcacctgtttgctgcaggctggctgcagatcccagggctgccctccagcaggattggccagtggagctctccccagagccccttcgtgtttgtggcagccttgcctggagctaaggctgcgagtttcaggggtgtgtgtttcctgcagctgatgtcagggcaggtggaagaaccaggacggggcagccaggttggcccagcgcttagtgttgccagctccagaatcattctgtgccctgtgctgcagctggtgcgagcggggtgtgcgctgacacgggctcttctctggacccagctctgctctgccgttggattctgcagtctgtccctccaggtgtggtgggagaactgcgctttcagtgcaagaagggtcctggaaattaacgtgtcccccacccctgttccctgagccaggccatactttgaaggcctgtcgcactcgagctcgcagacggagattgggagcatccacagcgcccgcagccacaaggagcccccaagcccggtgagtggggccacactgatctcccagagcagaccgtggtctgactgggctgtggtgtggcccaaatctcccagcatgtcctgggcccagggccctgtccagctgtcctggagccactctgcacccactgtccagcacactgccacgcaggtaccccgggcctccctgagtcccagcattcccagtccagaagtcagcgccttggcacctgcagttgagcacaagctgattcccatctcctcccccacaggctgacgtgcccgagaagacgcggtccctgggaggcaggcagccgagcgacagtgtctctgacacggtggccctcgtaagcaggcttgggccgcacccacccgttccacacatcaggcacaccaatgctgcctttaagggtctgacctggaggggcggggcccacatataggtcctcatgtcacacctggtgtgcagaggtggggtcagccctcaggggtggccaggctgccagatggtcagagtatcccaaaattcactccagcttcagggtcagggcgccctggactcaccccaccctcagggtcagggcagctggactccccccacccgcagggtccggatgccctggactccccccaccctcagggtcagggcagctggactccccccaccctcagggtcagggcagctggactcaccccaccctcagggtcagggcccctggactcaccccaccctcagggtctgggttccccagactcaccctaccttcagggtcagggcgcctggactcaccccacccgcagggtcagggcccccggactccccccaccctcaggtggatggcacccaggaacgcctggttcccccctgctgcgttgcatggggtctcctcagttaggaggtcctgggcccagggcaagtcaggtcctgggaggttgggggctggtcaccctgcatggcccggatgggagccctgtgcttggaatttggctcagctaggctccctggtcagcgtatggccgggtccacatgtaggagccacggcctagagaggcctaaaccctcacccgagccagaggccacagggctggagaggccgcagcacgggtgtggtttccacgggaggctccaggcccgtctctgctcagcagggtgtgccaggcccgagggagcaccctggacagcctgaggacagccccgaggctgaggcctccaccctggatgtgttcacggagaggctgccgcccagcgggaggatcaccaagacagagtcccttgtcatcccctccaccaggtgatgggggctgcacggcggggcggggcggtgatgcacctgtcgggggaggggccgtcacgggcatcagtcggggtgggtgcgtgtcagtccatcctgatgagctccctcgggtgtagacagcagattcagggcctcgtccttcttaaaaaggagaagcaaaccccctggcccggcattgggtgtcaagcctgcagccccagattccaccctacctgtttgagggcagggtcaggcgggtctgccctccagcaggtgcccccacatccccctgagtagcccctgcctcagccaaaagacacacatacaccagcttgattcttccaggatttcaatttcatgtttctgtgatatttgggactttttccaaagcagcgagtctgggcactggtttttaccttgtggtggcacgcaggtgcctgtgtccgcgctttggagccaggtcgccctggcagcctcagtgccctgcactggcctgcacctggctctgcccagctcttggcccgggcagggagggtgagctcagtcctcacggtggctccaagcctcctggcctggctcgaagtctcacaggcagagctgtgtggggtcccatcggaggcacggcctcacttgtactcagctgctgctgtggccctcccagggctggtgacctctctgtgcagcccatgttcccactgcccatcagtcagccctgtgctcacccttccctgtccccaccacaatgtgtaggccactgcaggcctgcccctgcctctgcccctgttcctgttcctgctgccacagccacttagcctgtcctggtccccaataggtccgaggggaagcaggctggccgacggggccggagcacatccttgaaggagcggcaggcagcacggccccagaatgagcgggccaacagcctggacaacgagcgctgcccggacgcccggagccagctacaggtgcagctgcaggtgggggtggagggcgtggcacgcccaggaggcagggctcgtggtcaccctggcaccaaccagagcagggcaaaaagagaagcacagggggccaagggtgctgggccacagagcatgcctgggctttggagggctcctgctacacagcagggcgggcgggccatgggttggtttgtcaggaagaccatgtggaccccagggcaagttctagtccttctgctgccctccctggtccagggcagcctcattgcttggctgatttagcccagggcagttctccaagctggccagctctcttcctgccaccgagcctctgtggctgcagggggagcaggggcactgcaggcaccagggctggcgtggtggggatgggcgctgtgcttctcttctgggtgtggacagggctctgtgcctccagatccccaggaagactgtgtatgaccagctcaaccacatcctcatctccgatgaccagcttcccgaaaacatcatccttgtcaacacctcggactggcaggggcaggtagaggggcagtctcttggagtggagggtcagggtgtaggacagaggagagtgggttcctgaagctgccccctacccggcacacctgggtgctggagctgctggctgtggtttgcctggacgtgcctggggtctctggagcccctgagagctttggtgagggtcaggtgctgggggtggcctgggcggctgtgccgaagtcagcgtctgcctgtcttctgccagttcctctccgacgtcctgcagaggcacacgctccccgtggtgtgcacgtgctctcctgcggacgtccaggcggccttcagcaccatcgtctcacggatacagagatagtgagttgggctccaccctgtactcaccacccaagtacccctcggggtccctgcacccccacctctgcccattgctccggggctaggtgcgtcctggacctggggctgtggctggtgtccacagaggctgacccatgcgctcttcgcagcctggcctcccctcagttgtgggcgggagcagcagcctggtgggtgtcctgccacactggagtggtggcctcctggcctgtccttggaagcctgggctgaggccatgactgtgtggtccctcagcctgggcacgtttgggcatgtgggggtcctgggcttgggcagctccagggcagttgtggcatgagcggccacaggcacggagccccctgggctcacactggcatccttggatggaggacggctcccctgaggcgtctgtcccctctccgtcccacctgcctctggattgcagctgcaactgcaattcccagcccccgacccccgtgaagatcgccgtggcgggagcgcagcattacctcagtgccatcctgcggctctttgtggagcagctgtcccacaagacacccgactggctcggctacatgcgcttcctggtcatcccactgggtgagcaccacgccgtccacctgggcctgggcacagatgccacgggcagtgtggcgtggcatggagtggtgtggcgtggcgtggcgtgttgtgtggcgtggcgtggcgcggtgtgtcgtggtgtggcgcggtgtggcatggcgtggtgtccctgcttgctacacatttgttgtttttaaatgtttgtttgatacagtaacactttgttaattttaattatatgcaagataacttgattgccctaaaacagccatttgggtcaagataaagccatcgccctctgaaggggcctgagctgggtgtctcctccatcagtcgctgtgataactctatgccagtttcgatttccaaagtcagaagtgcaaagcagggctcgttattaatcctctcaaatcgtccaggtcctgtgtcgtcgaactccattacttctttaggtccatacgatgtgtcttaccacgaaacaaacccacccagccttaatctgttgaccagcagcaaggcctggaggcgacacctctcccgtgtggccctcacgatgccgacgtcagagccctgagccagccgaggcctctgcacggtcacatgtgccctgctgggccttcctcagtggcactcagggctctgggacctcagctcagggctggagctccttcagcggggccacaggcatccaccagggaggggcagtggtggctttctctttcggtggcaggaaagtgggcttgtctggaaggcagcagcacaggcctggggtcgggtggcccagcttttgtgccgcggtgggagccttgcagctccgagtcccccgtggtgacaccagccccacccctggcatgcaggctcccaccccgtggccaggtacctaggctccgtggactaccgctacaacaacttcttccaggacctggcctggagagacctgttcaacaagctggaggcccagagtgcgggtgaggcccgggcgcgtccacagcccacgccacggcgggaggaaggggccccggtttccccagatgctgtgcccaggaggccctgcacctgctcaggctcagcctcagggaagaggccatggacagggcctgctggggccttggccaggatgcctcctattcccctgagccttggaatgttggaagctgtggggcctgtctgggaaggggcgggcacagcccttcaggtcttcccacgcttgccctggtactgcctcgagagtagagcaccagggcccctcagctgcaaccagcgagccctgccgcgcttcggggtacgggaggcctgggcggggcaccggggaggcccagcttagccccgcctgcaaccccacctggcaccagcctaaccccccaccgcctcctccccctgcagtacaggacacgccagacattgtgtcacgcatcacgcagtacatcgcaggggccaactgtgcccaccagctccccatcgcagaggccatgctgacctacaagcagaagaggtaacgcggtgggcccaggcaccataccacaggctgccgccagccaccaaccctccgtgggcctccccacccgctgctgggcttggcctggtgggccgcagagccctgcaccgggcttagaccagagcctgggccagctgggcagctctgggcctccctgacagcaggtgcttccccgcaccccagatccctcatagtaagcgccatttccgcacctgtttctgtgcatgttgaaaccccgcgtgataagaagttgacagaatggatagctgtcatggggccagggtggcagtggcccagcccctccagtctgggcacctgttccttccacagcctgggtttctcgggctggggaacgaaggattccctgggcctcgggccctgtgggtgagtgatcagctcgtgtcctcacctgcccagagcaggacggtgctcaggagcccccggccgaaagtcctgcggagacctgtctgtcccgcccggcgcctcctccctgcacatctggcgccactgtcccacaccttccctagactacaggggagagagccgagtgcaaggcgcaaagccagcgctcacgggctctcccacgcaggagccccagtgagatgggagccactgagtgccctcggcggtccctggaggggtcctgagggcgtcgtaacgtgtctgttttctcttttggtggctttctgaaaaggaaaaagcattttcattttgactttaccctaaggtacggctctgtgggtctgcctcccaccctgtctgtccccaggctggtcttcagggcttgtttggcagagtcacgtaggaatcaccccgctgtcctctctccggactgggagtcaggccctgagggccaccagctgcaggctgagagcccgcacgggagaggggaagtggccccaacccgagtcactttttgctgacgtggacccttttcctccatccgatctctgacactgagtcaggagagcagcagatgggccctcctgtccctggccaggcccgtgtgctgggactccaccccagagccctgaagcctgcaggtcggccaggcaggcctttccccggctctgttttgaccctgggttttgatttaagaagtggccaggtttagcccctcctcgttttaaaccaggagcgagtggctggtgtggacaccaggatcacctgggccaggctgtttcccaggcccttcacgtttgtgaagctggcagcagcctagcaggggcacgggtgcacgccctacacacggggacgcccaagcaagtagttaaggagctggcctggtgacacggtggtcagcggctgtgccttgggccccctacacactgcagagcctggctcccagggctccctcgagcacctggggccagcagagaggggtttccagcatcttgtggcttacctggagacggggccaaactaccgagacctccaaatgggggtaaagagttttcattccgaggcagctccaccccctacaacctttcatgttcagagccaagtcccaggcacccccaaagctgccctttcagacagagccaccccttttccttggccaggtgtgtcctgctgcagggtgggggcccctgctggtcctcccatgggctcgttctctaccccgtgtcttctgccctgtgtgaggtcatttgctgtcctaggaaacccccccaaccccctgacctcagtgcagggtagttgggtccctggggcccccttgctggcctaggagctgctcgaagtgggcagcctgggaccacccacagctgtagggctgggcgctgggaagacacaggaagggggctgaacatcctatgtcttgtcctgctaaacaagccttcacaggtgaaagaccagccgtgggggcctcccctgctgacccccagcagcctccgcccttgccccctggctgtggcacgaggagcctgcagcatgttctggccgcccggccgccgcaggccgtggacgcagctgcttgtatctcccaggtcagctcttccaagcagcaagccagggccttagggggccttacacccactcccaccctgcacctcctgcccctgcctccgtgttgcaggggtgacactggctgcctccacgttataagggtgacactggctgcctggggtcctggaaggaacccagcaaaggccataagtgtcttacctgctctctgtacccagaggagggtcagtcgggaggctgagagagtgcaggcggtggcacagcccttgtgacgggggacctgtgcagagccctctccagccaggctcccctgcgagagtccctcgtgaggtgactcctgctggcccgccctcctctgccgagaatggcactcctcctatgagggcaggccaggcctggagggcggcctcgagccccagcctgcccgtgcagcgcatgggtggaaagggctgctcaggcatccggcagcttgcccagggccatgcggagtggcccccaaggcatctgtgccctccgtgcccgcggggcctccccacgccacggtggtatgctccttacactcctgaccacactgcctccacagacatgtgtgtgcctccagggtcaggatgagggtctcagtgtccagccggtgtcacccctgtcatattggcccatgtccagggctgggtgctgtctgcatggcccagaggcgcagcttggctttgagagttccagcaacatccctgtgttgtgacgtctcctgcattcggccctcatctgccacgcactgccccatgggcctcggagcagagcatggatgggaggccagcctgccatggctggctcggtgggggggtctggctcggcagagggcaggtggccctgggaattggagccacccatgccctggggaccagcagccaccacctgtcttctgtgccttcgcgtgcctgggaggacacagatgtcacagatttccaaacactggtctgctcaacaaggatagtgggatgtcaaaggccacgtccaggcactcctgcctgacagctgtggacacagccagggtgctggggggccaggaggccgccctgaggcagaggtgggcctcaacacaggatttgcatcgctttatgttatttgaaatggacaagaagaggggaaagtttcaactcttctccttagaaatggaactaggcctggggcatctttaatgggatgggaggaatctgtaggtggtttcatccagaggcatttgccaggtcttctgcagagggtgggccaggagccgtccaggttggcgtctggggagggtgggtcttgccagccgccgtctcctcacactggcgctgcgaagacagggaaggcacctgctgggaccagccgcagaggctgcctcctgggagtgtgctctggaccggctgccgggcagaggctgttttacttgtgggcacactttgtggggagcactgggatcaagcctctgccctgcagggctcttgaggagatagcgctgctggtcctgggagctggtgctccaggcagacggctgggctgggcctgtggcatcctccgctgggcctgtttcctgcaagggattctctctgaatgaccctgtgctggacgacaacccaagggagggccggggccactgtgcgagcccatgttctgcacctggtgccgggctgtccctgagggccaccctgctggcctggccattctcgtcctgcccccggcgctccaggggcaacaggtgctcctctgcactgtgtgtgcacagtctccgcctgtaagacagccacttgccggcatcagactctgcagtttggggaaatgagacagaagaaacagctgagggagctgcccagagagaaggcaccagttgctgatgcggtctggctgaggaagctgggcggggaggcacctctgtccctacgtgcaggccacggggggccttgaggccaggggagaggaggaaagaggagagccagacccagcccaccactcaggataggccctgccctctggatctttcctggggcccagaaggagatgccctcacctcaccctagctgccggcggggcctcatgctgtgctggccccttgtcttgtgggagagctccctgggcccaagcccaggctgcagtgggcacagtcagcaggagcctgtgcgagctggaccacaggacagccctgcttgagctgcacacgtcggaggggaagacagacgggtcccctcagcggccccgcggctcctgtcctccacccttggcatcttcgtgtggacgggctgtgaccagacttccaggagaggctgctgttacctgccagatgttgtatggggccaagtccaggcaaaacctccactgcccgctgagtacatcagctcacgcggggcacggcctggggtgtgctgggcctgcctgcaggctgtgcgtggggtgttctggtagaacatggaggcccactgcagccaaagcctggcctcttatgtgggcatggacgttacccagatagtctggagaaaacttctgcaccctggctttggtgctgctgattaccagagagggcccaggctcttcctgggagtcccagggcactggcagctgccctaaccccagcagagcaggggtgcccagcttggtggggaagtggaaatgcaagccggacagggctgagctggctgtgtgggcgtcgggcacctaggatggcagagtgaatccctccgtggagctgtgccctctggcctgtcctcctgaccatgggtgcacagagacccctttgtccttccagcatgtcagcatgtcagaaggggcccaggcgttggtcctgggggccaggccagggctggcagtggttggagatgggtggggccgggacacacagggcagggctgtccggcagggccatccggcagggccgcggccccagggctgcgccaggttctcaggccaagagggagctgtgcccaccaggcggggctgtgccctgaggagagcttaactgtctgtttccttgctcttagccctgacgaagagtcctcccaaaagttcattccctttgtcggggtgagtactggccagctttatgtgatgggaaaccgcacacctgccaacttgtcgtttacagtcagaacgtttggggattgactcgatatattccagaaccttcccacagatacgagctggggatttgccttcccatctggcctgtctcaaagctcgcttccttccctgctggagtggggtgtggggccagaggttgttagttccccttagctctgccttgggggctgataaatggaagcagagacaggtcggtggggcgaggcctcagaacacccaggaggcttggccccacgtctcaggagaggagagactgcctgcccgggttggggagggcgcctctgtcctttaggagcccaaggccccgggagcttcccagtgctcacttgggctgcagcctgcagtgtgtgggtttcacttcctgccctgcccagggttagggctgcttctgccagccaggccatctccctgccagccctgggtctccacagcctgtttcctgccatcttttcgctctgttgtgtggcctccctcccgccaggtgtctgctgtgagacagacccacagggcctggcagacaggttgcccaggcagcggaagggtctctgggcctcggtttccccactggtggaacagaggcctttttgtgcaccgtgcagtggttgggtctgctgagggctctggggcgatggctggccctctgggagggtggaattcgtcttgaacagcggctgcccaaagagctttctccggtgacaagagtacactgtgctcgggcacacaggccttcccatgcaaccaaggccctgcggtgtcactgggattcacggtagatctacgtagccgcctgtggctcgtggctgccaggtccggggcctatccccgtcggcccgccaaggtccctctcaccagcgtcctgtttttactgcacacatagtttgcagctgccctgagggccgactttagagagagcagtccctcctgctgaggccacgcaccctgagcactgtctgtccccacatggctgctctgagctcagctctgctccacagatggggagagaagggcaggagggagctggcaccacctggccgctccagcatcatgggagtggtggccacggtggggaggcgggagccccactgggagggcgctgggctagctgaattgcacggctttcaccagccagtgcctgttgttttctaggttgtgaaggttggaattgtggagccatcctcggccacatcaggtaaccccgtcccaccctgaggccttgtgagtggcccgtgggtgggctgcaggagcacggtcattcgagtcctgcagaccagatcaacctttcagggcctgagagccgccacgtcccagtcttgctgtggtgcttctgtcctgcggggggttcatcctccaaggactgctgtcacaaagccccacatcaaggctggcagggttgtcttccaaaaaccgaggagaatccgagaccctcccgtctctcacaggccactggggactcccaccctgcccacccccaggagctgcctggcctggccacatcctggtccggagggcctggtggcacccgggcagagcagcaggtgggctcagcctgccctgtgactcctccccaaaggcgactcggacgacgcggccccctcgggctctggcacgctctcctccaccccgccgtccgcatctcctgcggccaaggaggcctcacccaccccgccctcctccccgtcggtgagcggaggcctgtcctcccccaggtaaaggtgcctcacggctcagcacgtttcacttacccgccccaccacatgctgcctgattcagtcatcctcccctatgtcacatccacctcccagggcacctggcctgtcagccacgaaggcggaggggctctgcaggacggctgggtcctctctggccacctcctgccacagatctggtgtttgggggcaggacctctgggggacagaaactcctgcacagtgaataaacatgggcgttgtgctgggctgtctctcagctctgtacacagttggggcttttaaaaaacaagctgagggcagaaggtgcaagagacgtgagtctctagacggtcctcatgggatgagcttcgatagctgtgctgaggccccgctagcccgcccgggtctctccggagcagacctcactcaagtggaactaagccatggggggttgtgggccctgaggccaggcgtggtgctggtgctgcgtgcagggctcacaccagcagatacccccccgacccccctgcctctgtgtttccagccgccggctccttccaggctgcgcctgagggagctggttcgcacgggccctcacgactccaaggggcagcttggagagcaggtggacaggcctcccaggccgaggctctcctgtcgccagggtccctgtaatttaagcaggacccttgtgggggtgactgggcatgtgaacagctccacagagcatgctccaagcacccggccctcctctgctggcaagttggcacaggtgctggctgtcacctcctggcctgtcacagggacagtgatgtccccatcactaggcccaaagatgcaggtgtgaatgcctccctctgcctttcccagccagggtgtcggcgccgagctgatggggctgcaggtggactactggacggcagcacagcctgcggacaggaagagggacgccgagaagaaggacctgcctgtcaccaaaaacacgctcaagtgcactttccggtccctccaggtcagcaggctgcccagcagcggcgaggctgcagccacgcccaccatgtccatgaccgtggtcaccaaggagaagaacaagaagggtgaggtggggcaggctataaggccacacggcgcagaagggcggctctgtgggagagggcggctcgcagtcaacagggatgacagcccccgggctggcctcgggcagcccacatgcgcaggcaggggcgggtggggtgagggagcctgaatcctgagggcagtgagggtcaggtgcttctgaccagagcctcaggcggaggccagctgggtgggcaggagagcagctgtcctcagtcaccgtggaaggcaggtttcctaggtgagcagtgccatgaccagctgagcccccagtgcctcccccacacgtacccctggccctggccccagccccgaaggagcagcaagatgacagcagggcctcttttctcctcccagtgatgtttctgcccaagaaagcgaaggacaaggacgtggagtctaagagccagtgcattgagggcatcagccggctcatctgcactgccaggcagcagcagaacatgctgcggggtgagcaccaccggccccggggtctgtagagtgggacgtaggtgagagcacagcaaggctgctttggagcccagcctaggagctgcgggtgtctcgctgtgacacgcacattccacgattcaaggtgcaagcacattcgatgaagccctcagtgaggctgacaaccttccaaatgctgagaaagaattttttttcaaccctttttgctttttaaaaataatgacttgtttcgtttttcttgtttgttttttgttttggtttttttttttttgagacagagttttgctcttgttacccaggctggagtgcaatggtgtgatctcagctcactgcaacttccatctctcaggttcaagcgattctcctgcctgagcctcccaagtagctgggattacaggcgcgtgccaccacgcccggctaattttttgtatttttagtagagatggggttttaccgtgttggccaggctggtctcaaactcctgacctcaggtgatctgcctgcctcggcctcccaaagtgctgggattatgggcgcgagccaccgcacctggcctaaaaataatggcttgtagtttaaaagtgttggctgagcgcagaggctgaggcaggagaatggcgtgaacccgggtggcggagcttgcagtgagccgagattgcgccactgcactccagcctgggtgacagagcaagactccgcctcaaaaaaaaaaaaaaaaaaaggggttttggagaagatactctgcaagtaactgtttcagaaacggagctctgggaggctttcctctttttgagcacgggtcagatgacctccaggtcgacgtggccctgtctccccacaggggtctctgttttaagggggctcccactgtcttcttcccacacctgtgcaggtggaagtggatgtggacgagcagcgcctggcggaaggtggtggggtctgctccttccacctgcaggcagccctgggggaaatgctgccctccccaccccccagggctctgagtgtggagggcaggggcaggaatggcgtccctcaggagccagcatggccctggagcccccgagtccctgaggaaagtgttgatgccctccagcatggggctccttctcatcctgtacgcccggctgccacccagcctggtgggccaggcaggcaggtggatagggtgggcaggccgggcaggggggcaggcggtcaggcagccctctcccacagtcctcatcgacggcgtggagtgcagcgacgtcaagttcttccagctggccgcgcagtggtcctcgcacgtgaagcacttccccatctgcatcttcggacactccaaggccaccttctagccccacccaccagggggcccacctcctgccccatgctgtgaggggcccagctgcatttctgttaacatttcagtttactacagagacagacgcttaaaacacaaagagaaacagtcttaagtatgaatgtgctcacaacgtggaaactaacgggggagctcctgccaggagccgaataactgctctgcttattaacccgaacgttcggcccggggctgggaagccagaaggacgatgctgagccatggatcgcggaaggcgtcctctggcctcaggagccacccagagcctcacaggctgagttcttgcctctgtgtcctgtccttcctggaagtcaggactctgcttcctcagggagcccggggaaggcggagctcagtggccacaggccgagggccatggggccgctcagtcccgttggggttgtcctgagttgagcctgggggggccgtcctgcccgcctaagagatgcccccagcaccgcacactcgtggttcccaataaactcctgcctgcggcggaggttttatagcagcagatatttttaatgcttttcaatacatgttctaatgtagctgccaaacatgttgctcttctgaagtccccctggggctgggcagagccagcagagcctgcccccacttccccagcccctgccccaccccgcctcacaccttccccactctcaggctgttcttgaaacaccatgaggcttctgcgtgtagtccctgccccaaacttagcaagcacaggggcctccacagcccaggtggccccagaaaatgttccagagcccagcttggtacatagtgagatgctgctggggttggcctgaggtgggggccacttcctccaccccagtgggtatgtctgaggtcagccatggggatatctgggttgagattcaggttttggtgaatatggggcaggcgtccagatgtgtttgtgtcacctgctgcaacgctgtagccaatgaagattccagcgggatggcctgaccagcggggccggcactttggagccgtgggtgcagccaggtaccccgtgcagggcctgggaggctctccaggccacagtcctcagagcgtgttgggtcccatgttgtgtgtgggttccatgccctccacacagcaggagagggcttccctgaccacacctgccccctcagtcctgcttctccccagtaagcctgcactgtggggtctccataggaggagctggggaagctggggccctcccaggggtcctgatcgaccctgggggctcttggcctggtttcgtaagatggagcactgcaaaaggccatgctcagaaagcaaacgcagggcagggtgggcctcgagccggggctggaggggtctccacccttgctggcctgagagatggcccacatttcttacttgtgaccgccctgctcttcctggccgccccccccaggtggctgaacagggtgattttgttgtggtgaggggccaggatgtggcctggtgtgcagcctcagctccctgggttcaggcctcagaggtagcctgtgtgcaggaggcagagccccagcccctcccagccagagcccctccacaccagggactcctccttcacctgggaccaggagcctggggcacaccccagggtgggggagagggtaggaaggtctcccattgaatcctggcttcaggctctgccccgagaagtgtctgcggtgagggtgtgagccccgggctgatggcctctgaccccggcaacaggtgggaccctgactgactcgttcagctgcccccaagctgggctgcagagcatctgtttttctgctctccagtttcttttctttttttttttttttttttttgagatggagtcttgctctgttgcccaggctggagtgcagtggcatgatctcagctcactgcagcctccgtctcccaggttcaagcagttctcctgcctcagcctcccgagtagctgggattacaggcgtgtgccaccacacctggctattttttttgtatttttagtagagatggggttttgccatgttggccaggctggtcttgaactcctgacctcaagtgatccacccgcctcggcctcccaaagtgctgggattacaggcgtgagtcaccgcgtcctgcctgctcttcctgtttctttcccaagggtcacactcagtagggagatgaaggtggaaacatccttgctgtggctttctggcctcagagcaggttttagaggaaggggccacaggctgcctagtgcatcctggctgtgggcagcccctttcctggagccctcctgcctaccccgtacctcccatctggctgcacagctccatccttagccacgcaaggggagaacatgggcagagtctccatccagcagctgggggttctggtggcactccctgtgcccctgctgctgctgggctgtgggtctgccctgcacccaggagccccacggtccatcccccacaccatgcccagcaccagggaggttgggcagacaagacctgggccatgccagccctctgtgcctcggttttcccactggttacacaggatggtcgcattttccctgcctacctcacagagctgttctgagggtgcatggaggagcactctgtcccaccaaggacaactagaaaccaaagccatctgacagccagtgcggtaagggcgggggatgtgtgtgtgaggtgtgcacaccccccgagaacctggccctggactggcctcacaggacaggaggcagccccttgtagagctagggctcagccccatcagtctcaaaggttaagccaccagtcaccaccgaggcacccctcaggcctggtggccactgtccactattacgtagacagaccccaccctcacccaggccagctgtgggccagtcccgccctgcaatctggtctgctgccttcctcttccatgttggtccccttggccactgtctctgggcatgcaagccagtgtcctggttcagtgcctcggccagagctggggcaggagaggggcctctgggtgagagctgggggtgtctctgcagggtactggcagccttgccacactgtcctcattcccagatggaaagacctgagtgcctctcgccttcctccgggaatgaattcctcatgaaaatgaccaggccacttcttccgagggccaggccgccccctccccgagacctgtcctgccgtccgcgggtgtgtggcctgtaggggactgagagctgggcttgctgggcacctctggaatctgaccctgtgggccaaagaagcaccactgtagtttctgcagacccccatgcggttcattgtgcattgtttggtttctaggatgtatgtgttgctagttttttttaatgaaaccctggattaatgtaaatagctttttggggaacggattctaatgtcacgtatgtgaccgtgtggactatttcaaggtgctgatgcaacactaataaacctggaggggccggcccccgcctgcagtgtgattctctcggccgtccaccccttgggagcacgcggcggagcagcgcctccctcccgcccgcgcgccccgtcctgggtcgccccgccccagccctgcggccccgcgcgcgcggaggtggcccggggctcagcggcatcgcgccgcttgaagggcgcagggccgaaaggggctctggccgacaaaccccaagttcaggtctgtgcttcgggagaccccggaggccgacgcccggaagggcccgtggggcggtagcggccatagacccggatatgcgccggggacccccagaccgcgcccatcccccacccgccgcaacggagcccagaacgcaggcgcggcgcagaccggaagcggaaccggtgggggcggggcttgccgtagcggacgttctggagcgaggcgccggccccttgggccccctcaagccgcggtgtactccagcggccccctgtggcctctccatccgcggcgggtctgtccctccttctgtctccgggtgcccacgtaccccccacctccgaccgccgttcccgtgtaccccgcccccccgccgaaccccagagtgcccacggcctccagcgtgtgtcctgagccttcttcccccgtccctccgcggaccccggccgcgcagaccccgcctccccaccggagagggcgggcacgtaagggctccgggctgggcctggggcgaggcctgggccgcgtggaggggaggtctcagggtcggaagcggggctgtggcaagagctctgggcctttccttcgccccgggcgtagcaaggccgggccctgagagcgtgcccgcagtgctggctgagggctgatgcccctggaacgtttgagaaggctggcagaggcgtggagtccgtgcagcaggctgccgaaggctttccaggctcccggggtggggtcggcaggggcagagaggacagttcgggaggctggtgtggagaagagctgcggcgggagctgggggatccactccacccagaggggtcagtgatgcctgacctttggctggaaggtgaccctagcagaccgcgatactgccaccatctgcccccagggactcaggtattggtgggcacgtgggtggccttgtgggccccgccccacctccccctgctcctacccccagatctcagaggtgtggacaagcagcctactagggctagagatggacagcaggaaactgtccccccgggggaagaagctggagtcgcacctctcccaagagcacaggcggcccccactgggcctgatagcagcctggggccagcccagtatccagagcagcgttcagcagggactgcagactcaggactgggtaagcggaaggaaaccctggccgaggctactctcctgtccccagcccgcctgaggccgctgtctctgaaaactccaggctggtcgtgatgagcagcctcaggggagggctgagtggggactgatgagaaacagatggctggactcaggaggctctc

SEQ ID NO: 427 - DNA, 708765 bp, Homo sapiens
  source 1..708765: mol_type = genomic DNA
tataatttctaatacaaatgactatatactgtcttaatggacttagaaatgatgccatagtggagaccatctttcccaaaggacaggtgagttcccctacctccatcctcatctgagagtgggctccagggtctccctggctcccctttcatgcaatttttgctgggcagattccagtgcccatcttgacagcacccgggccggctccgccttgggacacgccctcccaggggatacccttgtgtcttagcaaaaggtcctgaagccaggaggctggtccgctgagtcaaggttgcttcatggagcctattttgacttctctgtggaccattcctacttctcttcccagtgccgctcaaactgtcagtttcaacccacaggtccctttgtgacttgggtccccacaacatgtgattattgcctctcctactctgctgtccgctgtcagttgagacaaataagccatgtgttttggcattagcaatgggcctcctgctcagggagaaaatgaacaaacctgtccatcttcccttttcacttcccacacctggcatgcttgaaagaaccaaggaggtggtattgcctcggcttgccatgcacccctcattcctaatctcgaggtgatagaatttggatgtagtgacaggatgagcgttgctatgacaacccactgatgctaggtgctccataagagggcatttttgacaggtcctcgcaaagtctgccatttgtgtggggaccaaatctcctatatttgtgcactagacatacctagggacatagcaccctttatgccttcaaaatgccgcatgcatatttgtgggcgtccctcttaaagaaatagcaaagccttactttgtaatttgggaaataagaaccaggtttgtactggaagtggactcgaatctggacctttctctgggctcacaggactcaaggccaggactcaatcaaaacatctggcttgctaggatgattccaagggtccaaagggcagtcatgggactatcatgtcgctttctgcataatttttcattcatttagttcgagctgtactggctccttcaattcagaactcctcaggcttcttcaggcagcctgggccttgcagtggactcatgaaggttcttgtctctccccttcccctctctcctcaggtgctcaaatacgcaatcaaccaccagttcctgtgtttgcaaacttcccactttgagacttccaactgtaagactgtatattgtcttaatggactaagagtgagaatgatgtcataatggggaccatcttttccaagggacaggtgagtcccccctctccatcctcatccaagagtgggccccagggttctcctgccccctttcctgcaaactttcctcagatgtgaggaaacttccaactttctctaaatataaaaaaaaaaaaaaaatcacatctgttaatagaccttttaaaaaagcccagctaggcaaggctgcccaggaacaccagagacaccaaaagaacaggaagaaatatgccttttattaggagttgcatatgtacagagaaagctgtttctcacagctcaggggaggctgtgagaaagagccactgtcatccaaggtcactgcgcgtacactggtaacaccacttagacaccgccgcacgtgattaagaaacagaaccatgacacagaaatgcagaagagacacgggtacgtgtgtggacacatcatttctaaaaacaagtcaacacaaaaatacaatgtgccaataaaaaaaaaatagacatatccatacatgtctttttttctgtttttaaagtaaatacatggtatgctgagctttcacctccagctttttccacatcgggattcacaggcactttagcaccccagccatggtttacaatacaggatgttcagaacaatgaaggaagatgggagccaccgagatccccgagacccacacacacactctaatactgacgcgagagtgagcttcctgccaccaccgctgtgggacccgaaaatgttctctgtgtgatgtgtaacggcttttcctttgtcttttatgtttcatggcagaactacttaggagcgcggcatcgccagtcagacatgcagtgtgtggatgcattagacaagcatcaattgcctctgacttgaaaaaccgtagagagcagatcaaaatgactgtctggtttatctctgtcccattctgtgcccttcctgacaagctgtcagaacaaaaactaattaaaataattactaggatgtactgggccatgagctcttcctaggagaatttctttcttagctctcccctcatgatagacacagggccaatggcaggcccagcttcccccggcaggagccactcctgtctcccacgttccccacacagagctgtggtgactcaacccacgtgtcaggaacaggaccgaacaagcgtatgtataaacgcagaccaggatcatcactttattggtaatgttgagtcataaggcagttacaaaaggacccccatggtgaccaaacaatgttggactatggcttagcttctgtaataggatgaccgactctcccgtcacaaagagctgagaaaggaaagagaaaaccacagtgatgacaaagtacgacaaatggctgtgctgtgaagtaccagaaagccccaatttttggtgtatgtcgcccacttttcctccaccagagactaagatgtcatcccatagctaagagaacttagagggagaaacagggccgcacgtcatcctccacttcaggtgaatttgtcactgcaagtggtgcagggatgttacaaccaagccgcggacaactcatgagtagggccgagattcctggtactgtggagaggcgcagagcatatgaacacctcaaacagatgattgtcacagggtgggaaatccttccatgaaacagacacttgagacatagtggcaaagacattaaggccttccatttctttgcctacaccgcttaaaggcactgataccaacaacagaaatactccatagtaccatcgaggttttaaaaaaactcccaaaatacaagtcttcataggaaaatgtcttttattgcgcgacatgaagcatccgttatttgcgtgctcaggaatagaagggcctccctttctcaggagtctgaagtctgttcagcctcgcaacctgagaaggggaggggggcacatcttgccggaagggccccttgggaggggcgtaactggggtcctggactttcttatacgagtcatagttgctgggcccctcggaaggaggctgcttcttcatctgctgctccttccgcctctgttcctggcgaaggagctcctgagtttccagcatgaccctggcgttgaagccatgtcctcccaggtagccgttcctggagccttggtagctggagtacctggggttctctttggcactctggaagccttccccaggggagtagttctgctcccaagagtcctgggagaccgagctggcatttttcctgctttgcctagaaagcaaaacccaaaggttagtgtgagggtaggaagaaggagggagagggaggaaagggggcaggatgggatggaatatgcattttcacttttcaacaaatattcctgttctctcatcacatgccagacactgcgataggggctggagaattcaaaaatgactgtcctcagcaagcgcatagtcttagacaactaaactaacaacgagtaaacaggagagagaactagactgtgcagctatttagaaacagggtcatcctcctgtgtctgagaaggttgtgtctgttctgcttagggtaccaatatctcctgcaatttagacacactggcaaagtatagaagtattagaggtttggcagcttccatggtaggaataattgctcgctttagaacattacaattcaattctaaacaagcacaacaaatattttacacagctgccaccataatgccagaagcgctagctaatatgaagtacatgtaatggattacagtatgagttcggttatgaaagatttaagtctagactcctttatgataaaaaatgcaacaggcagtcccttaaagctctggctttcaagttgtgtatgtcagcaacttacactctccgggatacctgctcatccagattggacggagagtccggaagtctgtaaagtaagcactattttcttatacatttaccttcaccaaaggccagggtgacctacttaacttgctttctgtcaccccaggataggcaagtaaatcagagtcacatggaaatttcaaattcttcccacttctgcaacagagttgggcatgatttccaggaaacattattgttttgaaacatctttaatttactatcaagtctctagatggttttatgaatttacaataagattggctatgatgaaataaaacaattctgtgccagaaaggaagacatgccctaatttttttgccttgaaaatggaagagggggagagacaattgagtaataaaacaaagtatattgctccatttatcaataagaaaatcatttggcgacagtatgtattgctcaaccctctccatcaacacacacaacacagctgaatgttcacaaagattttcacggaaggaaaagaaggtctgggaagccactgcatctcccgcaggaatgatgcaatttgcatttttgaacattcacaattgcatcaatatggtttggagtgaaatgcacccattttccatatggcctaaaatgtagttgggaacattttcagtaaagaaaatgaccataatgtccagcatcacctctggctatgacgatgactggatgagcattccatagcatgtctgtctcttttaacggaagactgcaccatttgtacagtcagcccaggcaagaatccttagatgtgatggaatagtttatttgcctaaagcactgattatcttcacttaagtcataaattaatctacccagagacaagactgttggaaaatgccggcatgaaaccagggatttgacattaatcatgaaactttaattaaaacaaggaacttgtgactgatattacagcaacaaaaatgggattcttttatgagttatcagtttgaagataatcagaaataggctgcagacatttcacctctttttcatctctggcctactaagatccaccaacccccttcctccccagcttcatggagccccaggcttcgctctacggcagctgtgcaccctaagtggattctgcatcatccccggaagacacagtctttctacatttaaacagggagaattcactaaaggtttgttagggatggaaattacaacaatgtgggagaaccaattttttgtagctaaaattttcttcaaattaatcagtatagagagaaggaagcagactgccctgaggtctgaagtaagatatgtgggtaaaatgcacataagacagaaacacacacacacacacacacacacacatagacacacacacacatgcgcacacacacaattccttggtaaggaagttagcagtatctatatgctcttgattaaggagagaatgagaaatgggccaattgtagagaccaagggaaggaaacagacaataagagtttcctacactaggaaactaagcatccagctgggcaaggtgggagtggcttaggcttagagcaacgtagattcaaatcctgagcctgccactggctggctgtgtgacactgggcgagttctgctcactgggctcaagttaccttacctatgaaacaggcataatctctaaccctgaaaggttgtggggagaaagaaatgaaataacacatgtaaagtgcttagaaaagtgacttgcactcagtaagtgattgactaataggtcccggaggagtagtttgaagacaaagtcactctgccttcaaagattaggctctgagcctgggtgtggtggctcaggcctgtaatctcagaactttaggaggatgaggtgggaggactgcttgaggccaggagtttgagatcagcctgggtaacatagtgagaccccatctctacaaaagatgttttgaaaaaattagccaggtgtggtggtgggtgcctgtagtcccagcaacttgggtggctgaggtgggagaattgcttgagcccaggaggtcgaggctgcagtgagccgtgattgcaccactgcactgcagcctgggtaacaaagtgagacctcatctctaaaagaggagaaaaagaaaaaaaggctcaggacttagggaggcatctttttgaccaaagaagaaaattgtttttaatttaatttaattattttgtttttgagacagagcctcactcttttgcccagggtggagtacagtggtgcaatcttggctcactgcaacttctacttcctgggttcaagcgattcagctgtcttaggctcccaggtagctgggattacaggaacaaaccaccacacctggctaatttttgtattgttagtagagatgggatttcaccatgttggaccaggctggtcttgaactcctgaactcaagtgatctgccgacctcagcctcccatagtcctgggattacaggcatgagccactctgctcggccaaaaattgttttttaaagttagctttcccttccttggttggagggattgagtagagatgccaagacacagaaaagcatcagaggagaaaggaacccttactaagcgagggcaactttggcacactgctgcagagatcagacggaagcccatgttcttcccactgtcctgtgagcccttggctaaggccatgggtaacaacagcaacaaaatatcaatctcctttcattgaatttctttataaccaacatataggattgtttggtcctgcagtgagcccctggacattgctaaatccactcaaagcacttaccacgtaccatggtttggcaataactatcacctaaagattatcacctaaagattacaaccacctccaacatggcctggagaccatcagcatggagaggactcaaaccaaagatctgatgcccgaggaaagccattaagccaccaggatgagggggacacagacagaaggaggaagacagagggagcgaggctaagaagttgggaagtagattggagacataacaaatgggcctcgtggagagaacgcgggagggtgcagagacacagcgtggagggtgaggtatacaaggctttcgaggaagtcagaccacagcagacacggagccgagggaggggagaaagatgaagaagaaatggagaggcaggaaaagaaaatgaagggaaacaccaaaccaagaaccttatttctctctaccagtgcctgtgactacgcacgcctctattccttttgggggctgccttttggatattaaggaaagaaactaatttaggaattaaaaaaagatgatgtcaaagggtacaaatctcaatgacagaggagcaatttttctgttctactgcacagcatggtaggtatagttaataacagagtattgtacatttcacagctgctgagagagtaaatatttgaggtgatggatatgttagctaacttgattaaacttaattaattcttttatgctatattcataaatcataacatcactttgtgccccacaaattatacaattataaactgtcaatttataatttttttcttttttttttttttctttgagacggagttttgctctgttgcccaggctggagtgcagtggcgcgatctcggctcactgcaagctccgcctcccgggttcacaccattctcctgcctcagcctcccgagtagctgggactacacgcgcccaccaccaagcctggctaatgttttgtatttttagtagagacaaggtttcaccgtgttagccaggatggtctcgatctcctgaccttgtgatccgcctgcctcggcatcccaaatgctgggattacaggcgtaagccaccacgcccagcctataatttataataaaaaataaattattttagaaaaagaaaaacaaacaaaaatcctattctgattgagaactgagtgtggggccaccacacaggtcccttttcctgccaactagtgttaccacctggccagtgtttctcattgacatgccaaaatgtaacttgatttctgtccatagagtttcttacttacagttagaatttacaaaccactctttctcatatacatgcctctaattcaaaccaccttatctaatgcaacggatacaaagcccagaccatttgttttattttacgctccactttgtaactatactttttttctgtgtgtaatctttttggtttctaatgccataccaacttgtttagacaaaactctgttaattgtcaacatccgaaaagcagaggtcaagtgtctttgaagaatatcacatgtcagaaacttggacttgactcaagctcacggaggtggttgcagtcccccctgacctcctgtttgctttctttcccttccctcagatctctgcacacagcctgccacagagtggggctgctttgcaaggcatcaagccgaacgcagggttctatgttcctaatctccctcacaaacaggaagattctcattgataaattgttctctaaaggaagacaagaagatactgcagaaacctaccagcctccgctgcccaaacttacataactctttaatttgaggatgtctgcttttctcatatctaaataggataaaatgactaaaaatagggagctacaattaacccagagggaaagctgtagttatttagggcaccactaaataacagcggaggcactagcggtagcggctgcaaccctcctctgcgtgtaaatatagatatctctaccaggcgcttccgcagggagaggcggagaagggaagagatgtcggggctcagagtaaagaagggagaggaatgggaaggcgaggatgaaaggttcggcgggaatgcatgagctactttggaatgcaaccaggagaaattcagtggaagcacctgcctctgtcttttgcctcttctgaggactgggacccaagtgccccttctccctggcaactgccctgccttcccggcccgcccaccgctctctctcccacctccctttctcagcccttggcagctcccacatcactgctctcattatacacactttgttatgtttctccttcaatccttagagacactctcaggcacggccaaaatatatgaagccaaacaactggccaataaaaataagaacacagcccctgccctgacaacaccatccacacaagctatgaagtgccctggcccacccgtgtggtcgtgcagggagggccatgccaggtgggccaattcgtccacactgtcagctcacccttccgatggaatgcagccacacagactggagggcagtggggagggggcaggggggtagcggagtgggggatagggtggattttacacagaccaaccttgatgtctaattcttcaagtgcttaggcatttgattcactgggttgattcacacagtgacctccttctaaatgctgagggcaggagagcactgaggggaactttgcacctgttaatatcccaaatttggggccaggtgtggtggctcacacctgtaatcccagcactttggggggctaaggtgggcagatcacttgaggccaggggttcgaaaccagcctggacaacatggcaaaccccttctctactaaagatacaaaaattagccaggcgaggtggcgcacgcctgtaaccccagctatttgggaggctaaggcatgagaattgcttgagtctgggaggtggaggttgcagtgagccaaggtcgcgccactgcactccagccggggcaacagaacaagactctgtctcaaaaaatttgggaacagaagcccttgatagcaacgggccttataaaatcatggtttagggcatgggcagattcaggtttgaatgctggcaaaatgacttgctagctgtgtgagctgggggaaatttacttactctgagctgtttccttgtaagataagattatctcaaaggtcctataaagaccaaaactttaatgactcttacctacagcaggctaaagaacctggcaattctcctctttaaaggaaaaaataatttagtactcaaaggggttttatatagccttatggattgaaaaagaacaactgaatgaataaactgctacaatagatggcacttatccccatggagactcattcacatccatgtccccttggctgacctgtatccatgtggtgaagtccgttgtggttgttacagtgattatttaacatgtaaagaaattcatcttttcgaaacagggtcttgctctgtcacccaggcaagtgcagtggtgtgatctcagctcactgtaacctctgcttcccaggctcaagcgatcctcccatctcagcctcccatggagctgggattacaggcatgtgccaccaagcccagctaatttttgtatttttttatggagatagtgttttgccatgttgcccaggctggtctcgaactcctgggctcaaatgatctgcctgcctcagcctcccaaagtgctgggattacagacctgagccaccgtgcctggccaggactcatctttattagaaattgatcaagatcactctacactggtcagtcaagataagcatttgtctcctaactccctaaaactgttttgctcaaagtcaaaagtctacctgatatcaacatggcaaatgaatcttttcccacttaaaatatgtctttgtcacctgattttgaaatacagcaacaaatgcctataagaattgtgactacaggagtcacctgttttgggaagtttaaaaagctgaatgtttttcaacatttttattctttactatgcctggaagaaaaactttgatggaaaaatagttactatttcaatgtactggcactcagtcaccctgagacccttgcaggcctttgtcggagaactgggccaaggcgtctcccctggggagcaggcaagtaagggtttcttgcttggttcccagctaacaagctcaacatccctgagaccctctaaagttaaacatgggtgagagcagtgatgatgggacagtaagagagtgaggtttgggaccatggatcccacacaaccacggcgtatgcagcactgactctcgatccttttatggagctctggatttatgaagtatcatttattctaataaccatatgtgctaagccaaataagggttatcttcccatttttcagatgaagatactgtcttgtccacacaggaagcaggagagccaatactaagaagccagtacacgagtcgcttcacttttttagggagcttgtgggtgaaaatactggcatctcctgcaatgggcatttcccctggcctcgcagtacgacagccccccacgctaaggaacagtagccacgggacatttattggttcctctgttgctaccaggggcaagctggagaggccccagtgacttgggaaggagcgcgttcctaaagggcgggggatcttaaagggccggggggatctggaggctcggccaagcgtcctcataccgaggcagagagctgtactggcgctgggcctgctgggagctctcgcgctcctcctgccgctgccgctgcatctgcacctccacggacaccgagtgtcgcccgctctgcgtcgccggccgtgcgttcggctggaagaggaaaatacaagcacatcgttaaccagaaagttctgtacagatcacacaactggttgactccatttcgattcttatgaattgactttgaaaattttgaaaattctgtgatttgtttttcaaaatcgtttctttgagaaaagtggcatacatatatttgctcttatgagcccataaacactcaattttcttaaactgtgattttggctttggcatgtggtttaaattgaagagatcaaactttctagtcttctttaatttttttttttttttttttttttttttttagagatgggatctcactctgtcacccaagcaggagtgcagtagtgcaatcatggctcactgcagccttgaactcctgggttcaagtgatcctcccacctcagtctcccgagtaaccgggattacaagcacaggccaccatgcctggctaattttttttttttttttttttttggtagagatggggtttccctatgttgtcctggcctcaagcaatcctgcctcagcctcccaaagtgctgagattacaggtgtaagccactaaacccagcgtctagtctttataatgaggcttggtaaatgctgacataagacaccatttacctctctccagaatacacagagcagatacaataagaatgaggctcttccaaaaactagaagatgttaatgccaaaaataaataaataaataaaaatttgctacaactctcaaaagagggaaagtccaggagtgcacacctgtgaggtggccatgttgatgaattttggggggtaggtatatattttagttttacagcaggatacagtatagctgattccctttctagtacaggatgacagtgaaattttaagccaagattagtttaaactaggtaccaacaggtctcctgcaatccacagatggcagccaaacagggaacagaaatgcctatcaaaagaacaaacccaaaagctactcgctacttaaattggttattaggtaatgcattttaccttagttattaggaaatggcaatttacctaagttaatcatcccctatagagaacacttcaatccttctaactaaatactttggttagcactccatttcaggagttcaagaccagcctgggcaccacagtgagaccctgtctccacaaaaaaattttaaaaattagtcaggtgcagtggcacatgtctgtgatcccagctacttgggaagctgagacaggaggaccgcttgagcctaggagattgaggctgcagtaagccatgaccgtgccattgcactccagcctgggtgatggtgcaagaccctgtctcaaaaaaagaaaaaaaaaaaaggaaaaacgaaaagaaagaaaagaaaaaacatactttggtcagcaagtcatctggtgattggtgcttctcaccgaaatcagattactgaacgtgtataccgcatggtatagatcaggtttctgggatgcttcaatttctcactgacaatggttaccttaccttctagatctggccttttgaaataaaagtagctgtgctcaaaatatacaatggtgcctctacatttatgaaacatcccaatggtttgtcacagcatcagcagtaggccccttaagtgatccttttcagtactcgccaccctcagttccccctctgttatgcaacgttgtgcaacaggcatagtctgagtgaggaatgtctgtttgaaacaagttattgattttcttttagagttgaaagctaatggtagactttgccctgataatgattttctaaaacaacagagtctgaacattcatttggcgagctgtaagataacaggtagccttgttaccaaaagaatggctcctatggttggctttggccagcacagaaagaaatcaagcatcatctattgttctctttctgcaaagccagcacaaccttacttgttgataagcagtaatgaagcaatatacaggacaaacatttcaaagcatatgggcttagttagtgagcatattaaaaatatcccgatacaaaaataatgtgtgaggagattaggctttacaataccccagtctctactaggggctttataaccacactcactggaacaaatgtgtattcagagacccgcttcacaacaccgttcaaataacacatcagtgaggccttcagcaagaaaaacacttcgctgagcgagttctgcttatgcaaacaattgttcatcaactgcattaaaagagacagacattttcttccattacacttgatgaggctggccaaaaaggaaactgagctgttttcttgtcacggtgagcaatgggaagcttgagataaaccactggacagaaagaaaacactacaccatttcctttacaccctcaaaagaaccacattttcctttccttttcactcagtgtaaactatatgcatgtgtcaaacagtcttgaaagatctggcattctgcagcaggatttagtaaccagctttttaagctcgtgctgttctgtgacaagctgcttgtggagatgtgaagggaaattgcaaggtcttgtagaaatttcaggtgtatttttaagttgtttctcccataggcctgaaaatttgcttctgacagagaaaaaagaagttgaaggacttgttttctctgctgtgtgttttctgacactgttcgcctcaaactttatcagctacaagtatctagttggatctggatacattccaatgatgacattatcagcatatggggtctgaaaacttaaaaggagtgaatgagtttgggatcagcaaactgacatatttcatactatcatgctcaccaggaagaaacataaacattggcttcaccattaatagtttactccatttctctttttagaacttgcaaaagggtgggttactaaacagaatcactcttacctttaagataaaaccctctaacaggtcacatatttcaaggaagattgcatacatgaccagcccagagcaacaactaaataagttcatcccggcaagtttgacacttgacctgaataaaaatcacccctctaattcacaatttaaatgaagacctcttaaaaacaaaaactggatgaacagtattacaatggcaatctggaattttacacactgtggcttcaatccctatggcatgaacaaaataatgtatctgagtccaagcacaaaaataaagtgaagaaaagaggtaatttgtaacctcacagagaagtgtatgttttcaaataaaatatcatcaacaactgcagcgacaaagtaacacccacatagggaaatacctgcgcaggcataactgtaataactctggagattcaccagagaacaaggcgaagctctgttctaacagtgcaaattacaaataaccctgtgatgaaattggttacaagcaatgaccttttaaataaaaaaaaaacatggctgccagagccataataacaatagagattgtaagatggaaataaacacacgagtatatattacacaggatgctggagagccatgatatgtaaatctcttcatggcctatgtttaaaaccacaagtgaaaaatatgtatttttttttgtaagtggactacaaagtacttgtctttctcatagattataaagggataataattcaagcttgaggaagctatacaatgttggtatcatttagtagggtaaaatataaaaaaatattttccacagttttttttttaaacattttgtttttattttagagtcagaatcttgctctgttgccaaggctggagtacagtggcacaattacagctcactgcagcctcaaactcctgggctcaagctgtcctcagtagccaggactacaggtatgcaccaccatgcctggttaattttttttttctttttaatttttgtagaggcagggtcttgctgtgttgcccaggctggtcttgaactcctgctctcaagtgatcctcccacctttgcctcccaaagtgctggagattacatgcttgtaatggtctcatacggtgttttatgaattaagtctttaagcatttctcttaattaaataaaatcattgcttcaaaataaaaatagaaaaaaatgaaaatacaaaacgaaatatttaatagacagttaacagagtaaagaacaaacatgaatatccacagtacaaagtttcagtactaattagaactaggtaatactgtaagactttgacagcttaatatgcgagtgtgctgccacttatgaaataaaatcattgttatattaacatatacatagaatattcaataatttcaaataatctatcacttttcttcttatagataaggaaaatagtgtgtaagtatgtgtgggtgtgcacgtgtatatatatatccacacacatatgtaatatttttataaaggatcactttgagcagattttctccttaaattatgaatgataaaaatctgcaaaattttgtatgtccaagggcacatatagaaaacaaaaagtaaaatacaaaacattcaggcactttggatgaaaacctgtgatgaagatgatggtgagaatgatgctgatgacaaaaagactaatggcattcccttgagattcacaatccttactttagcaattcacatgagctgtgaccctaataggaattccatattctgataagagtagcaatttaaagatttggtagggagcagaaatcatttttatgccattaaatcatgtgaagagtgtcaactgttgactctgttgaaaagtggccagtgctaatattggtaattattttcttcagtagacttatgtacaacctttaatcaaaacaacgttaacttttgtctacccatcgtgccttcccagccttccgcacccacccacacatgccataattatgtaactattgactgaactcttgtgggtcttgaatgttgaaaagcttaattgctcctaaggatgtgagtaatggctgaaaagactgcaaagcacacccgtttccctcatgaagtttttagaaatgaatgttttggtcttaattgtatttgtcttcacctcatctttcacaccagtgcttagatcttttatccccgcccccatcttaagcaataggaacactgaaaataaaaaggttgctctacaaaacaagccaggcactttagtatctgggctaatggcaacccaaggtagcttcaggagttcctaccacacagggcttctgagcatagcatggccatgagtcacagagcctttggctgagggacaggtcacagggcagaataaagtgctgactttgcgacagtacagaggctctctccatgtgtgatgggcacctctctgcagatggcttatctccaggtctatttctttctttttttttttttgagacggagtcttgctcttgtcgccaagttagagtgcaatggcgtgatcttggctcactgccaccttagcctcctgggttcaagtgattctcctgcctcagcctcctgagtagctgggattacaggcacctgccaccacgcccggctaatttttgtatttttagtagagacggggtttcaccatgttggccaggctggtcttgaactcctgacctcgggatccacccacctgggcctcccaaagtgctgggattataggagtgagccaccgtgcccggccctccaggtctatttctatgcgaggtgatttccacccaactagagctagggtcatactcatttcaaggctgtcaactaaggcagcattttttgagtcaaggcatggaggccgctaggagaaaatgagagcagatactttttaagtcttaaaaaagatggaaacgaaaggaaaaccaccattttctgaaattgcccaggcacagggaggcaatctagtggtacagagtggctgtgtgctatgactgccttgccaattaaagcaggcagagccctaagagggcagggagagctattaaagtctgaaacaggaaaagggagaaaaggacagattttgttattcattgaatgacggacagctaggaaacaagcaagcttgagggagaagaggatattcacattgcagagtatcaattttctacctgaaggactaaactactttcagtcactcccaacctgggatggaaaggatttagcaatacagctattattaaaggctccattatcccatctatcagtcgtctcagccagcaagtctccttgttggcaacactcaggtatctgcaaagtttttacggcatactgtacttacgtctgcagcctgcaatttagttcttttaaaagcaacactaagtcctgtccatatcgaagctctgtgataataaccctaacctcacctattgttccattatcttaagaaagatttaaagcaacttgctgctttatttatgttgcacctggcactacgtgaggaagaagttgccttttcttcttctcttgctcaacttgggagagaattcacttcaattatggagctaaggaaattttctgggcctctgctcatctaaagaccttttgtgccacaaatcagctccctcaggcccagacattattttgaacaaaggcccaggaacaggtgcattctgtactgctagagcttatagagaacattttcaaaataggtagattgaaagggctacttggatgaattttccgcagcatcctgctctgtatgtaaagtaattggcttacatatttttctctgtgacacatctggctgcactttgtgtgtgggcatttctaacaagcatgacaatttcaactaatatgggctcagttgtacacacagcttgaaggtgagtttgtggttccttaaaactaaaatgattacaaaccattccaaagaatgagatcatggtcccatcccttccaaatacagtgacccttcaaggtcagaatacataagagaagagaaggattccaagatgcaaaaagctcattttgtaaaacagataattaaaaccatagaccaagctacattttaaacaactgagcagctcttcctaaggtaaccataagaattggtatgaaaattaatacactaagtagaattccagtcactttaagctcatttacatgatcagtaaaatagagcaagatctcagtttcttgaaaatgaaaaaaaaaaaaaaaagaaaaggtcaacttgtgacccataatttaggaaatgattccatttctaaggtaatcagcctgtcatccaaataattccctgctcactcattaccggaaatgctaatacaagccaagttgtctgtctgaagttgctatggcattttgatatataataatgtggtccatgaccttcagtagttgagtttccaaatgtacaagattttttcaaacattttccctaacatgattgttcatattaagtagataacatagaaatgcattccagcctattcactgttcccattcaaagttaaaatcttataaagaaaccaaaatgaatttcaaatcattttcacttttcccaatgaaaaacatctagatactaagacgtaggaaatactcatttagcctcaaacaaacctggaggtctcgcatgtggatacaatgtcagaaaccagaaataaactcatcaatctgagttctcaaagacatatgtctgcttctctgttatatatttaaaatatattccaatttcaaagaggggttctttcaagccttttctgaccaccgcacactgatgtggtcctcacagctccgtggttctcaacaccccatgcacacccctagcctacctctgctatatggtaccaagtattcctttattttttatcagttctactggagagttctgagggcattttttcttttcgatctttgttctcccataccaaccacaatgcctgggacatagtaagaactcaatgaatttgatgaattaaataattagttaaagagtaaatgtcaagatgctggtttggaatccacattcccaggcaaagtcaaatggcgaacactgctcctcatggcatggtatggagaatgataagctcaggcggggctgtgccaggttggaactgtgtgcatgtgtgttaactatttccatattcagctgctgttttctccttcagcttgacaccatgctcattactcttttcagcctctttgtgtaaatatacatagttaagaatttatcacacatcacaaaagaatcctgtttcaagaaatgtagtaggaatggattgagtcaattatgccaaacaatataagcagattaacataattctgtcatgttgctacatgggaatgactcaatgtacttgatcatctaggaaaatgaactaaataccttagaaaaatgccattaatagtaatattgttgcagaagacaattagagattttccagggaacttgttttataacctcccaaagttaggcaagaattgatttcatgaggtgcttttacacctggatgctgatcccacattgccagttgccccatcttcctcacctgaactaagttaaagctcttcaaactacagttgacccttgaacaccatgagtttgaactttgagggtccactgatacacagagtttcttccacctctgccactctgagacaagacttactcctttctcctcctcccctgcctattcaatctgaagacaatggagaagatctttatgatgatccacttccatttaaagaaaaggaaatgtatgttctcttctttatgattttcttaataacatcttctttctagtttatattactgtaagaatacagcatataatacataaaatgtacagagtgtgtgttaatcaactgtctatgttactggtaaggtttctgttcaacagtgcgatattagtgcagtagttaagttttcgggaagtcagaagttgcatggggatttctgattgtgtgtgtgaggaggaagggggatggtcctccaacccccatgttgtttaagggccaacggtagtactgcttctcccattttttcctctttgcctttgctccacaaaattaatcttcctcaaaccctaatttggtcactaaatcccttaatgagcagcatttataggtttcttgctttatgtagagtaatatattgtgagtattgggtttcaggaccaaaaaggacctcagagatcgtctagactttagaacagtgattctcaaagttgaacttgtttcagaatgagttggaaggctcattaaaaaccagattcctgggccccacccgtaaaggtttacatctagtagggtcaatgcagggaccaagaatatgtattcctaacaagtttctaggtgatgctaaaggtgctgttctgtggaccacactttgagaagctctgatcttcagcagcagctaacaggatccagcctctgtagtcaactagaggggttctacttgcatctgctttacatttagcttcttcttaaactttcatttcatccaagggtttagtaactgacatccaatcatttattctttcttttcttttttttgattcagagtcttgctctgtcgtccaggctggagggcagtggtgcaatcttggctcactgtaacctctgcctcccgggttcaagtgattcttctgcctcagcctcccgagtagcctggattacaggcatgtgccaccaggactggataatttttgtatttttagtagagatggggtttcatcatgttgtccaggctggtctcgaacacctggcctcaagtgattagcccaccttgacctcgcaaagtgctgggattacaggcacaagccattgtgcctggcctgcaatcatttattctaatcttggttgagagataagaaaactgaggccggaagagccaggccacctggctactgggccagtgttctttcctagcactatttctcttcaaactttcaatctagcattgaaggctcttcctacatttctacctttaatctccccttcccttcaacataaccaacctctcagctgggtagtttacccttcctcaaatcaaatgttcctttttttttgtaatgtcaagcctcttttttttttttttttttgagccagggtctcactgcagtcccaacctcccaggttcaaacaatcctcccaactcagcctcctgagtagctgggaccacaggcatgtgccaccacatccgggtaattaaaaacttttttttttttttttttgtagagatggggtctccctatgttgcccaagctggtctcaaactcctgggctcgagcaatgctcctgccttggcctcccaaagtgttggggtgatggtatgagccaccatgcctggcctccagccttttataacaccattcttccttctgtcctactcttccaaatatctagtaaatgatattcccaacactttgtctgaactgaacttgtcaactttatggacactaatctccgctctacttctgtaactcacgtgcaaagatggcaggccttagacctcaacatcgtctgaactatcgcctctacttccaagatcctagagtccaaaaaatacactgttttgaccacaacttcctaggcttgagaacccctagatcctgagccctcttgcacactgctaggctgtgaggctaatccttccttgagctatacttgccaccccacctggaccacacgatgcttccccagtatccttggtaggactccagcacctcccttggctttctgccatgtctatcttccaacccccactaaagaattaatccacaaatttattccttctattcccagtcttctaagcattgccggttaggtcaaattaccatgctgcctggacttcctaataccccatgctagagtttcctaccttaagcagcttatttattcacctctaacagactcactctcaagtctcccaaagaaattcttcaaactccccatcatctcaaaaaatctgtcccaacccctccactctcagaagtgctgtcatctctagggtgagacacaagatcagaacacagttctggcactgagaaagccatctgaagttttttcactctggtggctatgagggggatgaactggaataagatggattcaacaaacacacatggggggtgcaaaagattaaagaatcaagaattactagacctggcacagtggttcacaactgtaatcctgacactttgggagactgaagaatgaggatcacttgagcctaggaatttgagaccagcctggccaacatagtgagactcagtctctacaaaaaactaaaaaattagccaggtgtggtggcacttgcctatagtccagctactctggtggctgaggtaggaggattgcctaagcctaggagtttggggctgcagtaagctatgatcgcaccaccgcactccagcctgtgtgacaaagcgagacctcatctctttaaaaaaaagaattactaaacactgtactttgtacattacaggcacaatggagaagtgctgaacaaattaattttggctctgattctgagaatatgtatctacagaaaaatatttactaaatttaaaaaatgcttagttgagagtgagaatacttttgctatgtcttgtcataaggctagtgaaacctattaggcaatggacagatggtggaacaagatataaaatgaaattagcaatgatgaaacccagatggaaatgaggaaaaggtcaatatgttaaaggtcaaaggaatttggctccatcttgtctcgtttcatagagcattgaggtcatagcttagtggcctttgctgcagggaagttgtaggaccattcaccgtgctgaagaaccaattacttacccagggttgctcaaaactataggtccgccgacgatcttctacatcttcatcttgctttgcttgctgaaattcttgcctcagacgctgtatccgatcatgattgctaggagttgatctgttactgaaagagagatgaggcagcagtgaatacccttcagaaatattatctgtgaactgcagttgctagcaaaacatggcaacttgctgtgaaatgacgccatttaagagaaagtgaatttttaaaacaatatgtgggcatttaaaatatgttttcattttggttttaggattaaggcttattgaggtattttagacagatatttgagagggtaaacaatatttttagatattctttttttttttgcactgttctttaaaagtttcatttcctttctgtaatctggcaaggtgttggcagggaagtttttttggaaaggacattgcattaaaagtcagaaacaacagggtctggtcctagcttctgtaccttcttagactaacgtacttaatgtttctaagctgaagttttttaaatatatgaagtagagataataattttactctaaatatctgagttgtaataatcaagtgagaggacaccatgaaatatagctgcacaaatgcacagcaatattttcataatacgaggttcctatttatgagtcatcagaggtctataaataaaatgcaattctcacagcaaaaatgaaaaacattttaaaaataagttcaagtggtagtttcatttaaccatctagttaataacaatacggccttctttttgtatagtattgaattttgttttattctcagaaataccttataagataggtgcagaaggtagtatttcacacacccacccacccacccacctacgcacacgtttacaaatgtagtaactgacatttaaagaagataagtggttcatttggggatctcccagctggccagtggggaaagtgagaccaaaatccagattttctggctcccagtccaaccctcatttcactatgccatgcatatcactttgtaaaacatgtatcaggctccaaagctcttcatttgtaaagtacaaattttaaaaagagtattttcgccaagagtaatagagattgatgaccaaaattaaatcaatcataaatctcacagcacttttggtctatgccattcactaaagcagtaagtttcatcctatcagtgacgtggacgggagacagggaaatactgggtaggagagggcggttcctcagcaaaggtcccaccctcagaagtctggaaacccataaccctaaatgggaacaggcattcctgtttttgcacccaaaagttgcctttttggcccaccacgcccccctatcctgcacccatataaactgcaaaccccaggctccatgaacagacaaacagaagggcagaagagtggcagaatggtgcggcagagaagggagacgagaaggagcatctgaatgtcaagaggagtttggctggggatggctggagaggagactgggccactggatggccaaactccaggggaagatcatcttcccaccccatcccctttccagcttcccatccatcccactgagagccacctccatcacccaataaaatccccacattcaccatcttacaagaccctgtgggacctgatttttcctggatgccagacaagggcctgggtaccaaggggggcactgggctggttaacacttaagccatctgcagacaggagagctaaaagagcactgcaacatgcccactggagcttcaggagctgcaggcacccacacccagacactaccgtggggctggaaccccggctcccgtacctgtacatctgcatgctccccctcccctaaggggtttgggcacacacagcagtcaaatagacaagccacacacccctgctgcatgtcctgtgaggggagtcagggaactctctcatttcatcaggaaagctattcaagcccatcaggcatctactgcctccacaacagaacgtcagacttcttgaggacaagaaccacatcttcttcttatcatatataccctccaagctgctagcagaatggaaagctgcaaagctattcggaagatcaggtctcttcacaaaagcatgttgccctggttactcagtgtgtgccagggttctgctggctgcacccctcctgcgtgatgtgatttgtgagaggtagcttggaaagagaaattctgtcacagtagagtacgtaaaattctcaaacggacataagtctacatataattccacatattttgaagaatctcaaaggtttaagcatctaaaattgaacatgttcatgtacaggatcatcatgttaacatcttctaaaaatatggaatagtctttcatcatttaacatattgggaggggcccctgtaccttcatgtatcaatttcactagagcttctagaatatactgtcaatacattcaatttgattattttctcagtcaataaaagcttgtctttctttgcttttcttctgacaaatctgaactgattggcctggaacattaaaggtgaacaggtctgtaaattgggctgcttgacgacacaaggcttcagtccacgtcacttcaaaatgtccctccacacttttgagacaggcaggttgttattcctactggctttaaaaatatatagtgtcctatattgttgcactgtccaatctaaaaagcactctgttctttatgtgaaaccgtaatggtgtaggcatgagtgaggatggttaccttcataagacaaaagagacaggaaagtgggcattcccgaatctcactgtcatttttccacctgtgcttttttgttcctggcatactttatagcttttatgggaggattataggaggtttgactgacaaagtattttacaaatctaaccagaagtattcttctgttattttcatgcagcacagagagttttaagcccataattattaggatcatgaagttgaaaccattgataaaaactgacctcctactatttgcaattcactgaaagtctgttttcccgacaaagggagttgaccgagtatcctcaatgttaaattctggtgacactggtgtttttcacagcaaaagataagttctggaagtcactcctgcccttgtttccaaatctggggagctaggcagacctttggtttcacccccttttcctctgctctttctctcccaatactctagagaaagctggctgacttgtctaagactggcaaaaccacttaatggctgaagttggaaaacaggctgcaatggttttcatgatggatgatgatttccaaagactggaagaccgtcaagcccccttggggaacaacaattggcagtctgaaggtgaaattctggctttgagagatgaaaccattacaattgctcagttctgtctctctggccagtctataatgagccaataattcaaatttggacttttaaagttcttggtgagctcttctgccaagaaagctaaaggaaattttaaatattcattagcaatagtgactcatccctacacatcctaatcaacttatatttaggttcactgccaacttaaagttggtcatgatttttttgtgtgagaaatataataaaaataccatccaagttgatcagatgggtgagacaataaaacccttaatgaagagtcagaaatcctaatttacagatagtccacatgagtgggatctacacagggatgctgagaggaacagagagatactttctgtataaaacatccacacagacagctataagacagttttagtccaataccaacactcagcctccaccaacacattggctttgtacccaactggaacttaatttcacgttctaactaaatgaagagggtttgcttttggttcagtaatgatctgggttttggtttttgttgttttttcctgacaggtttaaggaagggtacctaggatcacacactacagagattcctagcccagcgtgcacagaactatgtgaccctgaattatatggaacgtccataattactacggggattgcagtctttgatgtcagaggcagaccatgcggtgtacaaggcttctacatcttcaaattggatactactatgtgcttcctgaatgtggctaaggatacccattcaggctaaaaggagcaatgagcctatctgcagggaatcactgaagcctgccccgcacctgtgccccacaggcaagccaactcaaccacttccttaggtacgatgagagggaacagaaaccttacaacagcggttctcatctatatgcactgtgtatatgagaaccattcaaagagcttgttaaaaaaatactgattgccaaggcttgccttgagaaattctgagtcagtctagtgcagggcccaagaacttacacgtatatgaattcagaacatactgcaggtatatggacaacactctgaagataatgcctgcagttagtagactactgccatgaagggatgctggcctggtgttgcttcttatttaagagaagctagaaagacagctttctctcccaaatttaaaatgttcacttactttacttttgaaattctaggtaagccaaataacaattttgtccattgttggctagcctgtaaccactggttcacattctgcagacgctgcctattttatctgtcgcttctccaggctatttactttcattgcaccaaaataataaggctggtggtgctctagtaacagtcccccaaaatatgttaaaactgataaccaggcactgtccagatagtcttgtttctcctaaactgtcccctccttcccagctgcctaagcctgaacctgggtatccttccttgcaggcttgaagtctcacctatctattcagagcagtatatgctgaaagagaggagtttgtgatgtgactgattaattcttcatggattaaaaatgctttaacatttgcatttttaattatgcaaaaggaatctggaaacctggaagagagtagttttaagatccagaattcaatggaaaggagaagtaaccactctttttttaaagtaaggtggtctcggtatacactatgcttcccatagcaggggggagaaaaggaagagagaaggtagacaggaggaggaaatgaattgtggcaggctctccacattgttcagaaggcagagatgattataaactctggtacaggagaagaaaagctgccaaagaagagaggaaaatacagtcgctcaggtttttctttctttaataccctcttctttcccttccatctttccaaattctaccagtaagtctaagacatcaatccacttccttgcagcctttcctcactactccagcccatgttcatctcttcctttcagttcacctgtaattgtcccctgacccaaatactgacttacagagtttaccagaatcggcatgtgtatgggcttttctctcttaggtttgtgccttcatcatagccattcaacatgtacatatcttgtatgtcacttccctgtggcagaacaaattgatcagcaaatatttgtgatggatggatttaaggtggccctaatgtccacaccttctggggttcacacctttatgcactcctctacccttgaatgtggacagaacccacacttgctttttttaagatttaatttgattttaagtgccaggatacatgtgcaggatgtgcaggtttgttacctagctaaacgtgtgtcatggtggtttgctgtgcacttgcttctaaccaatgagaaatgcagcagggatcacgcagtgtttgtggttacaatcgtggtgtccctctttatgcctctgtctctctccttgctggtactgaagtcgcaaggagccaagaatcccacagctgcatggaacacaatgctgtcaacaatgacggaagcagggaagctgatatttccctagtagaagcctctgtgtgagaacccagtctggctgactccttgattgcaccccgagggagaccctgagcagaggatccagctcagtcatgctggaactccaggcccacagacacggtgatataatcaatatgtgttgttttaagctgcaaagtttgtgttactttgttttgtagcaaaagaaaacgaacactccattgttgttggccttggccatgtgacttgttttggccaacaggatgtttgtggatgtgacacaaaaggagtttgaaactgattgtatgctgggtgtattctttgtgctcctgacttctaccataacaagaacatgcccacagtctaagagacacatggagtgaatatgaatccaacctgcagcttataagtcaagcccagtggagcctggcctagatcagccaacccctagcctctctgtagatgtctgagcaaaaaatcaatgcttgttattagaggccactaggttaggcaatttgctatgtgacagcactgcagcaataaacgttctagacctccctcctcagaccgcccccacaccaatactaccaccccatcactttaaacagcattatgggggctgtacattcttgttaaattcaaggaaataaagtatggatggatttaaggtggccctaatgtcctagaaacacataggccctgcccacaagtggaaccaaacaaatggtgcttgttgcaaaagcatgttgttagaagagtggaatcaaagacaggcatcacattttacgagcgagttttaccatgatcattcatagaattagtcactgcaaagttctggtctctgggaaaaattgcacaaagtaaatactattgcagaagatgtaactgaaaaatgctcactgccagatcttaatacatgaaaccaatcaaatgtgctttccagtgaataccagtctatagtcaagaatgtcccatggaaatctattcaattgcttagggtgataccttttgtcgacctccccgctactgcacccaaaacacctcactagggctctgtgatctctgaaagtcagcctcctgagagaccaaggcaagaatgtgagtgctttcctggagcctggtgaaaatatacctgccaaccaggtgattcggtaaaactgaactcaagggctcattactggtttctctttctggcagagattgatgacctgctgggatctgggtcaaacacacaactcacaaaaaggtaatccctgttaacatttgatttacttagtttgccaagagctcaggacttaaaagatgccccttcaaatccactacttacaaaagcacaggtacatggtaaagattttttgttaaccatatcagcttatatcatttggccattttctttttgctatctacttctcagccctagcaatttactttttggcctatgtacaaaattctattccaaatgctagtgaatttcacacctgcacttggcatccaattactgcagatgaaaaaggaacattattcttttcccaattaaaaaaaaattcaaaaagttaatttccaaattgtatcaacaatcctggaaataatgcaataccacactccaaaaaaaaaaaagaaaaaagctttttcctattgatacatttctatcactcagacagttttcccatgtacacatcacagggcagaaaaaaattctatagttctgctagctgccaagctctctgcttaagaaaatcttttctctttcaccagccagcattcaaagtcctacaacttaagaaacatcatcatggtctgcatctcagcacacatagaaaggagaagatagtaggttaaagcttctaagactcaattcacttatactcaaagatcctattttcttcaaccctgacttttccaagccttgatgatgtccttgggtaacaactcaatcttcacaggaggttcttgcacttcagtcccctcatttaagaaaaatttatctctttactaacttccttcatagttccacaaatggaagaactcaagatccagcccattagtaaaaaacccactttccaagaacattgtttcatcttcactggagaaaaatgagagcactttttccttccttgcccaattactaattcttcttgtatcctgggaaaaaaataatctgggttattttacttgtaccaatggttaagtccaaacttcagctatttcatggatgtcatttaaagcagacaccaggactggagtaggcaaaaagtgactccgggagaaacagatgtagggcagacctgtcatgaagccgtagtaacaggcagccagcagtgaccaccagcgtctcagatcattaagcaatgtcttactgtgatgtcatccatggatgtacagagttgtaatcctttcaaaacagacagactgtcagcatgacaaagtggatacaaacaagttcttgaactgggatgactaaagcattggggggataaatgtcactgaactaaaaagggatcctatgatacagaactaccagatattgacaccattcagagaggcaggtaaacaacctgcttcccacttagatatttttctatactgattagcaattccataaaatatgcctgatctctagataaatagttctaatctacagatgtcagaactgagttcttaattgctgtaaattagtgagcaaacacaggtttctcattaaacccattacaccccgtgtgttaaaatggaacacttgtcatttgcttttgtttttcgttgttttttttttagaatatttttctcctggctctcaaatcaggagcattcttgataaaatcctagataaaaacattgaagcagagagacatggtcaggatatgtgtggcaggttcctgccccttgaagtgtttcttcttggagaaaaaacctttaaatggcaatggatttgtctaaattttaatgatgagcagtattatgcctttatctttgctttcttaagaaatagtaaattgatgtcaccccctgtgaaagcgtttgcacgttctcccacggtacctgttcaaagcacacggtgtgcctcctgtcacctgtatcacctgtacagtttgtgaaaaagtattaatcgctaaattaagagagaagggaaagaacagactaaaatgtcacagaaaagcaaactgtgaactttcaaattagttaagcatgaggccaagctggctaaaaagactgtggctattcactatggctctatctctcaggctggaagacttatgaggaatggaggaagggtgggagggttaaaccaagaaatgtatcaattatcaaactacaaataaaaatagctcctctgcgcaagcttcattaagttttatcagcaagtatcttggggttttacactcaaatcacaggtcataaattcacagtaaatcccccatatgttcaccaaacacctgaattcaatttctcttctggttgtgaagtaggaatgtggtgcccacattaattatgcatgcaaagttagtttctaacaagggccgctttttttgtgatgcttcagggtatttataacatctgaaattttgggatggatccttctttaatcttaccacttgtatactggtatgtaagtctaaactctcttttccaaatttgaacattgaaaaaaattatagttggtaaatatcttgttatagtctttgcatttttctatgataatcccagacatttatgatattgcacaaatggtcttgatactgactttgaggtttttagacaaatatttctgtggttatgtacaaatcaccctgaattatagagaaagtctaaactgaggctaagtggctatatttatatgtgtctatgtatacatgtgaaattaactacttaggaaatatcatgtcattttcagtttattttcacagttttactcatcatctgtaatataaaaagaattatgagaaactcatgcaaatcccaaaggtactcactttgctcagctgataaaattcatttccagattctgacacccatgatttgttgtccatttcacaccaatttcagtgtaataaatcataacaaattaaaaacatacagctatgctctctgggttaaaaaggtggtctccaaagctgttaatcctgcatttgcttctgatgtgatagctccagttctccagatgctttatggatcacagggaggtcatctctccatcggaaagcctcaggactagatcttactccaagtccctctgtggtctctgggtaacaggactatcattttataagcaacaaaacctcaggaatgtacccctcgccctattttattactttcatcactcttccttattagcttgtcattggtctcaggcaggagtaagaaaaatttagttttactttttgaggggaagtcctccagcaacagagaacatgcaagcgcaaagacatacataatttcaggacccagcaataaatacacacaagaaagccctaggtagctgatcttacctagtgtcacaaaaatgatccaagctggtctctactcaaaaggacagctgaatctatcacagccatacctccaatggggcatctactgaaaactcagcactaaagtaacactgcttagcaagtttttaaaaattatcattgtcaaactaattatcaaggttttggtttaagaaaccatattcgaataagagtgactattgtgagaatgtgtgttaagagctttaaacctcaaagatggtggacttcctcaagaccctgtgaggtacgtggacaaagggcaggggctgaggtctgggcctcccaagtctcttgactccctagcaggcaatcttaacatagatttaagcaagtaaaagatgagagaaaatgttttcggggtatacctatgaatttaaatgcactttagaaaataaaatgttggctgggtgccggggcttatccctgtaatcccaacactttgggtggccaagatgggagcatcgctttagctagtagtttgagacaagcctgggcaacatcgcaagaccccatctctaaaaaaaaaaaaattagctgggtgtggtggtgcgtgtaggcccagctacttggaaggctgaagcaggagaattgcttgagcccaggagtttgaggctgcagtgaaccatgattgcaccactgcactctagcctgggtgaaagaccgagactctgtcaaagaaaaagaaagaaacaaagaaaagaaacaagggaaaggaaaggaagcggggggcagggagggagggaggaaagaaggaaagacggatggaaggaagaaaggacgaaggaaggaaggaaggaaggcaggaaggcaggaaggcaggcaggcatcatttttcttggcacaatgcaagaaagcagttataatggttaatgcccaaagtgcacttacttttcatagtgtgattttcttgaattctctaacaaatggcaaggacgtgtaagggattctaataggttagagaactgaagaaagtttgtggattatattattcattcaataaaaccactggggatacaaagttcagccagttgtgacccacagttgaagtctgtgcctcaaactaaaatatacatttaggtgtctgattaaagagcaaatgaaattcaatgttacaggtgaaaaatcttgacaaactaaaaagagtgaaaaacaggaatacattataaaaatttgaaataaaggctgggggcggtggcttatgcctgtaatcccagcactttgggaggtcaaggcaggtggatcacgaggtcaagagatcaagaccatcctggccaacatggtgaaaccctgtctctactaaaaatatacaaattagctgggtgtggtggtgcatgcctgtagttccagctacttgggaagctgaatcgcttgaacccaggaggtggaggttgcagtgacctgagatcgtgccaccgcaccccagcctggcaacagagcaagactctgtctcaaaacaacaacaacaacaacaaaaaactgaaataaaaaggcaatggaaattaaattacaaaacctgatgggttttgatgacacaataaaatgattatcatgttcttcttcatattagaaaggttttatcattcaggcatagaaactaattatagaaccattattttaattctttaatcatgaaatgattacaaagaattcaaggcgaacattttctttgtttttgctttctgtctttaatgacagcataattgcaaaacactatacgaaactaagctatgtttttttaaaagaaaaaattccagtgcaatgcagtacttaattccaaatcatgtcataattctaaatcatggctaaattctacagactttcttgaaatgactcagaatattaaataatgtaacaagagatatatcacctgtaagtttcataagaggctaactctgaaacttctttgagaattagaataaaagtagtgaaacatacatctaataaccagttttctaaaaagaaaccattaatgaagagtttgtattactgtttttaaaacattttaaagatcattaaaatattcttcctgattgatttttttacttctatttatgctcttgatgaacttcataattattcattaataattttctgagcttttttttctatttacaacttggccattatttatctggagagagggaataaatgacatagaaatgttaattaatttaacttctcatttcagatttagttaaattattatattaggaaaacaaaaacagtgtgaccatattggtttggagttattgatagattttgaaaactggagttattgacagattttggagttactgatagattgtgaaagggcttgcaacattcttttgtcaattacatttttttttcaaagtaatactacatgtgcatagtttatattttaaaatgctaaaagccttaaaagaatcattaaaagaaacttcttaaatgaaacttctgcttcatcacatcttgtctctctgaccacccaaccccaagacttttaaagctttcagtcgttttctatgacatttctttttaactcaacctgagatactcagaatgaatccattgtaattcctggtttgtgatacactcttgctagtgatggtttcattgcttactttcatttagttatgatgaaagtgccatgctcaatattattaaatgtaagttgccagtatgaatctattacacaaagcaaaagctaggaatttaataataagccatgtctaaccaaattcctctggtatttagacatttctgggtaatatatttatatcactatctcctgatttattactgttaaacacacctgttgacttcctacaaaggtagatgaagcattagctctcttacactcaaatccaaattctgactccaaattcccatcttccacatcttcccaatataattatagcaaaatttatatgaaaatgattttacaatctgatttttcagatttccaggagaacaagtctatcatggcttattaagcccaatttttttcctggagccctctaacctcaaaagctcccaccacatacgccaatctaggctgcctgcttcctggttttctgcacagcagaagtcctgggacttgttaaagcacacattcggtggctgcctaaaagggtattagaactaaaatattttgcgtttgcatgctttaaatgtatgtattctatcattaccactcactgacagtttggctaggtatggaatttcaggtaacaaaacattacccttcaatatttgaatgtgttgctctattatcttctagcttacaagactgatgtgaagaaatctgattatattctgattctcaactcttcattgtgtgtgtgtgtgtatatatatatatatatatatatatatatatattttttttttttttttttttacaggatcttctctttctggtattccaaaacttcacaatgctgtcctttttgaaaaattgattttgctcagcactaggtgattctttaatctggaatcttaagttctccagttctggaaaagattcttgtgttatttctctaataatctatcctttattatctctgttctctctttctagaaattgttttctttaaatattggacctcccagaatgaacttttcacttcctttctttctcactatactgctctttgtcctatagctcatgttttcctttatgggaaacttctcaacctcatctatcaagccttctattgtgtttcttaatactgatattgtatttattattttctaagagttctttcccatttactcaataatcctttcaatagcctcctgttcatctttgatggttttaacatcatttctatttcacagaattactgtttataattccttaatatttttctcttctcttaattttatgtttcctccaagttcttaaagaaaacaaacaaacgttgtttgttttggactctgtcttccacaattatggcttttctgaaatgtttcacatgtttttctgcccttttatatttaagagtgaagcactaaaaagcagattagtcactgtgtgcttcaggggggtttatgaaatggtggacaggaaggctgggcagagtgtcacttttttggttgggaattctcatgacagtgtatgtggactccttttccagggcaattccatgtcttccgaagagaatctagcaatctttggtgcggggtgcataagcttgattcttgacattccagtgtgattctgtcattctatattaactatgtccattttcacaaaaatagagttactatttctatatctcattctgtttcttgttttggagtgatttccaaaaggaaaagaggaagaaatagctttactctctaatgttagactttctaatttctgttattcttaattctcaattattttcaaatagcttaaatgtcttttcaagaataaaactggtatatggatgcttatatatttttttaagtagacgaaagacatggatgtaaatgttccaaaatggtaacagctattggttataattacagaattatgtccaccacttcctaacacactttaggaataatttctgtattacttttttacaatatttatggttaatttagggagtacatttttaaaacattgagtttgtaatctacaaagctccaaatacaaatactgttttaaagatttaaccgagtcctccacactttttctcccaagcacatgacctggtgctatactcaaactagttttcctttctttgacatgtgatgaaaatcacagtttggctttagtttttgcccacatttacttctgctggtcaatatggtgactgtgacatacaatttttaatcctctgtttcaatctttgctggtcttcactcttcgttctcctgctaaagagtgaccagctcctattctgatctctcaggagtatcccactgatgctggtgacaaagaacgtttcccacttttcccactgcatgctcctatcaccactatggaagcgcatgcctcaagaatacaatttcaggctccagcacatccccaccagtagatattgtagttttgtggctaaggcgtgcaaatcgatacaagtaaactgaacctgattaaagtttctgaaaatcacagtcttagaagaaccgagtggtaagctgattagccaaaggtttactgaaagccttttttgtttcaatccttgtgtttgaaaatccttctagaaagtaataaaggtctcatccatcttgaaaagaaggaataatggatatttaacttaaaaaaaaaaaacttttgagattttcatgactcactgttgagtactttgtagaaaaaaaggacgaaattgagttcttttggtttctcactatttttctgacagaccccccacctcaccccgataacagcacttttataggtatctacctcttgtttctaaaagtgtaatttggaaacatattggctaactgtgggtttgcttggtttctagctaattgagactttattgtattgttgcttaatacatgattttaaaattatactgcagctgattaaaatgagaaaaatatatctttactattgtggcagagttttttctttttttctctagtttgactttttttctctcaatttcagggattttcaaatttctaaaacaaaaacaaatcaatatttaattccagactcaaattgcttaatatgtggataaaaaccttttgatctttataagtttatatatatagtaaaattttccctttacaatgtctaaatttgcctctacataataaaatttgtctcacaatgatatctactttaatttgatactttactaactttgttttggaaaaaaatcccaacttaatatgattatagatttttaaaatatttgtttttctctttatatatataattttttaaaaaaatctttcagctcctatgaaagggctgggaaaacagagtactagtattacccagccaaggtgctgccagatcatgagctctagggccaaaggtcacaggaattcaggggcacatttcaaaaccacctggtgcctcaaggctcagtaaggaagggggcagtgccagcttctacctgaggacagaggagaaaagaatggagcaaaacatctgctaaaactcagcatgacccttcccaagcagattggaacactgccttgcctgtattttatacttccaaccgatgtccaagtactggtgtgtagggaaactaagccaagaccaaatgggactaatgatgtgtttggaagcatcagaagcccagaatgaatagagagagatactgacaaacacactgacatacatacggacacaggcatagatttagatataaatatcagcaattgcctaacccagccacttatactaaagaaccgctttgggattccttttcttgagctggaaaagaaaagccttagaaaatacatactgaaatattagccacgtttgcacaagccaaccacctgacatgaagctacattaagcctcagaagtcacaggcctccacagataccgttttgttttgtcttttctcatattgtaatgtctctacagactggcgctgacattgtttcattttgatatcataatagtgtctccatggattttggctgacattttgttttgacattatgttacaacagacctccactgacatttcattttgtcaccacaacattgtttctataggtttctgctacgttattttgttttgacattaaaaatgccatctctgtggtctcagtgcaacattgtctagagaacttttggagaaggtatgggggtgcatgaaatagataagtggcatcatacagaacatttaatgaagttgaagatgttttccatagagataaatttatacgatacttaatatttgcaacattgtttccaagtcctagggtttattacaatatggattcagttaaggtgttaattctctgtctttccaataaaaggagaccccacaatcccttttatatgtcaaaaacttcaaagaattaatcctctatccctctattgccagaatcaagtttttttttgtttgtttttaatgaatatggtctgaattttgtgttgcagaactgtaggaagtatttacgaagtaaacaactataacccttttaattgttgaatttaagaaaccgttgatcatgacacattttataaatgtctaagaagacagaaaatgctgtcaattaaaatgccattgtataataagtatcttgatatcagggattttaaattctgaaaagctgaatcttataattgattaaaaatggtgatggtatgtattaaaattagcactaccagaaacagcaataaaaataattgatgaccatttgagtatttttaaataaataataggataaaaacatgaatcttaaactgattttgcagttttaggtagaaatcatctagtgattatcctgagagaggtttgaaacagacttccccctttcctggtagtctcctctttcttcttgtattcacaaaattctctatgaacatgttactatttgtaataagaccaagaatattgacctctaaagctgcatacttctaaattctattaacttaaatcccaggaaaatatctttacaatgtaatgatatatcttcagatttgaccaaaagccaatatgacaaatggtcataatgggaatatttctgtgtctttgcaagctatattaaaaaatgttatttgatttgttatataatttttcttctataatgtatatagacttcacagtgaaattatacagcacaatttaatgccagagaaggtgttgctacagatgatctcacgtttatcaaagaattgagcataagaaaattcatgaatctcaaacaagtctttgtttgaaaatgcttattctgtttcacaatttatctattacaagtatgtatattaaaaatactcctagaattcagcactagtgaaagtattctccacatgaactaacatatttcctctgatcgtagattaaggatttgatgttgttctttttgccttggctgccaggaaactctgagattaaactgatgtacaactataattactctgtcattccaattaggtagtcatatcaattttgtaatgttctttctatcatttttgtgtccttgtaaacttcatttgaacagctattttaagaagctgcttcaaataattttttggaaataaggtggtcttaactcatagagggtcacaatgaccaatttgttaagtatgaaatataaagcacagagtttcttgtcatattttgaataatttcttctgataccccttatagaaatcatcatattggcttcaagtatatgtgaataatatgagatgagatacaagtaaacatctaatccagtgctgaccacagaagaggcacttcataaacactcaatacgatgaagaataaggacatctagggagagacatagagtgggtcattagaaacccatgcctgcagctcaggagagaagtgaaactgaagatatagctttggcagtcatcgacatatacacaagtgtaatgtaagtcatggaagtggatgaaatcacagtgatagaatatggagaagagggctggagatatatgataaacccaaccaacaacattcttagaaaataacgatttttacttttcattgtagttgagtcacagcaagagagaagcaaaaaagaagcctggcttgctcatgaagtcgggatctcgtgggatgttacaatgtgctgggtttgagagcagtatgtgaggtgacgtgccggactctgccgcaaaagattcattgctgggagcaggtgggagacctgaatctcgctgctccctccagctgggcctcaggcttggggaatacctgggctatggcaggtgaatctgctttgctggtgaacagtcttctcaggggctgccaatccaattacttctatgagtgctaaggtttcactagttacaaaaaactctaaagtaaattaaaaatttgtttaaattcataaaatatgacagctctaaagtattatcataattatcctctccaagtccatctctaagactaaccttcctacttcctcaatgtgagatgaatacctgctgtcacatacatgttttgtcccttctatagtctggctagatttctcatgaaaagagggaaagaaattgtatccttctcttgaccaagttcaccatatcctcaggatttctttgcagatgaactatttagttaatgcagtttctaaggcccagtgaatagtattgtgaaagagatttttcaaagaaagctgattggacatcttcaatatacaccaatactttccaaacgaacaaacaaaaactttgtaagcttcattttttttttttttgcccttataatttaggactatgattctgtgcaggatttagaagtaattatcaagttaaagatgtaattaaagatttcaccaagaaacgtagtctgattaatgacagtaaggagccaaaggacagtaaactttttgaatttttgagagaaaagtcaggatttgttatcaataactgtggctttagtcgatgtttggaaaatcaagatgtttggcactgcagagaagagaggtttttttttaaattttattttacaacagttgtaataaaatccttattctaaaaacatgagtgtatatatgtacagctccaaattttccaattaaagcttcagtttgaggtatacattttttatccattttgtatgcattagggaaaaggtcgtgagaccacactcaaattcaatccataaacgacacattgttcacatctcgccaagtcataactgatgttataaagggttgaaaagcttcaatttaaaaaaatacaggcatcctctccttttcaccacaatgtgttcttagaaaccacaccataaagtggatcagattttcccataggagcaatgttataattggaggttatgtttctgaccaaggagttggctccatgatatggcaacaatggatcacacaggcaaagatataatatctctaaatctttatagtaactttaatagtaaaagtagattgcaagtaccacaagacggctttaaatatattctgttacttattcaagagacctcaagattctataaaatatacatatatagtactaaggaatttttagaactttggcaaatgaacatgctaataactaaatattataatacttttgccttttcttaaaagaccaaaaatggctctgcagaggtcttagatccgagttcttgaagaggaagaaggatgtcttctggttgaaccctttaattttaccccagagacccaatgtgcttcttatgtgatttttcacaagatctttcttttactttggaaaaatttccctgtagctagcagagacttaaaaaaaaattccatcaaccttagaactacagtcttgcattgtttaacaatgcagctacatcctgagaaatgggttgttaggcaatatcatcatgtgaatatgataagagtatacttatatgaacatagatgatgtagtctactacccagctaggctgtatggtgtagcctattgctcctaggcagcaaacctgtacagcatgtgagtgcactgaatactgcaggcaattggaacataatggtatttgtgtatctaaatatatctacatatagaaaaggtacagtacaaatgtggtattataatcttatggaaccactgtgatatgtgcagtctgtcattgactgacatgtggttatatggcacagaactgtattccaaaatgctagagccaggtcacagattgcatcattaagtacttcaatgtgtgctgatctctatcatggcatctaatactttatgtttttttcaaaaggattattcaatcatttcccagataattgatagaactggcatagaacagtatccagtctgtacttggattgtttgctttcctgttttcccatgcagacaactggccgtacatagcactgaatggaaggttaaaggcagagaaaagtaagatgtaggtgttaattatatgttgtgggatgagtgacagaattaaagagcattccaatgataaggtagccttgtgattatcaggaccaacctcttcgctttactgatgaggaaactgaggcccagagagatccagtgacatgacaaagctaataaactaggcagatggctgacttggagcaatgcagaagtataggtccctgcccagggctacttcagcttggctaatattctaacattcaactgctaaagtcttcctgattcacagaaattgggggaaaactttttttttgaaacagtgttttcctctatcaccctggctgaagtacactgagtatacacggatgcaatcaaagctcactgcagccttaaactcctgggatcaggcaatcctcccacctcagcctcctgagaggccgcaagtgatcctcccaacttggcttcttaaagtgctggaattacaggtgtgagatactgcgcctgtccaggagccattttaatctgtgtcatatttgaattaggggagagctctccctcacacacacacatacatattcatgagtgcagagacacacacacgtataataaacttttagtccataatatgaacataaagtaaacctgatactatttcttatttcacatgggaccagacaattgaagtccttaatgtacagtattacaagattagtacatttgaattatcataaacaacaaaaagaaaccatcctttggccatttaaattcagatcccctcagagcaagccaaatttacataactccattgtccacactgtatcttttatcagtagtcagtttaattcaaacgtcttgtagaaaagatgaattaaatattcatcaaagtccagagaattttaagcatctattccattatcttaaatggaactgcagacaaaacaccaaagtgaacctcttttttcccccttacccttcaacataaataaggcttttagtgtttccccttatggtgtaactcataccaaatgatgacactatttacagtatcttctttaaaagggcatagctcctatgcttatttcaattaaagcccttgtgcaattatgctttcaagaaacaattaacagaggaaaaaaccatttccctcactccggccttttagaattgggaagtgagtaccctttcttaccactagcggcattgaagtaattatttaatgttaaggttcaattccttgggtgtaaattttggttttagttgacactaaaaagaaacatcaatttattaggagataaaacttgttctccagtaatggagcagctgcatccataaatttattgcagtttaatgttctcacacataaagcaattagagttttctgatgaacagactttgctactaaatgatcatgtgtatcgtggtgaggatggcctgtgagactggaaagtagaatgtgaggcttccatgaaaaaaactgcagaaatgtaaaacaataatactactaataatacgtgttgggcaaatacaagtgagaccctctcctccatccatgagtttgaatgaaaagaaatgctgcaaatttagcagtcatggtgaacgcccacactgcagctttcctggcaacagactcacttaatgatgcctggaatgaagcctgcttggatcctgagcaagggaggatacaaacaccttatctttaagataagcatcacctgattttcctcatcaacaaggaacaacagtagacaggtgagcagtttaaaagtaattccaattgctgaatatctaggtcatacttgccctgtagaagactaaagcgcattcatggaagattttgtttctccccagacagtgccctcatctttcacataccacctctcacgtttcgagagagagacagagagatttatttctttgcatccatcccttcccctcccctgcaacactattctgccaatgtagtaactacctccaggtgttgaaactcatgggttctgcctgagcatgtttctttcccggttaatttgggaagactgattgagacttagaactactataaacatatttttgtaatttgtagtgacaattaccattgttatttactaagcacctactaaatgccaggcattatgtaaattgttgagaatacagaggtgtgacaatggttcctatactcaatggtcaggtaacaataatagacaagacattaagtgataaagttagtgtatgattttggggaaaataagaggagggagtgatcatttcttaaggaaatggtacagaccaggccagatgcatttccataggttccctaaatttgggctgggtttggagtgaggaattgaagtcaggttgagcggtcagcctatgtgaagggaaggcaggtttaagaagtaccaagtggttccaggggtttctggactggggactgattattcttttaaaagaggctgctgaaatgtccaaataaataagacagatcgaacacatctatgcagcctcgacgctcttctaaaaccccaccaaaatgccagcaaagacataaaaagtcttcaaatcactcagataacaagaataacaatagaggagactacagcaaatgaaagataacattttaggagctgtaaggctaatggatggggcttagttagcatattggaaaatgtagaaccctaagcttacatgaagggataaacggctacgtgttggttcagcagaaccccagaaagacttgggaattggaggtactgggtacctctgaagaagggtgatgggtcagggcagaagatgaacttttgggcatttttgcttttcacagcttttttttctttcatcatcttcagaaaccacaagccctctaaaaatgtgtgtgtgtgtgtgtgtgtgtgtgtgtgtgtgtgtgtagcatatatatttatattaattttattttgctctcgtggcagcaacaacaggatcaatgaaaggagcacagtgaagcagtactgaccatggggggtcatgcagacgctctgagaattgagcatctattgctgggaccactgtattcagaggcaggaggcagatgcaacacggtccactcacaatgcacaacctgtggcttggttgacttacaaaagcagtacaacaaacacagctatttagcacagtctgagaggtcacagctcccacctgatctggaggctgctcccactctgataattttaagacagtactttcagcaggaagtgggaagcctatgcatgccatgtgacctcaaggctacagataagtattaaattggatgactgattctcatatttttctgattattattgtttttagagacagaatctaactgtcacccagggtggagtgcagtggtgctatcatagctcactgtaacctcgaactcctggactcaagcaatcttcctgcctcggcctcccaagtagctgggactacaggtacaagccactaattttttcatatttttagagatggggtcttgttatattgtccaggcaggtctcagactccagggctccagtgatcctgcttccttggcctcccaaagtgctagaattacaggtgtgagtcaccatgcctggccatgaatctcatatttttataaagcagccatgtgttctagattttgctgaacatcacaatttccaatactctaatgctcataaagagacggctcatggtcaaactaaaggtataatttttaagttttttaagttggaacaaaatggtcaataggaggtaagaacttaaaaggaaagggtttgtttgcaagtgctcccacaagaaaactcggaagcgatgaacaagagtcaccacttcacttgcatgagaaagttcctcatggtacccctaagtcaagccctcactaagagcgcggctgctggcactgtggtcccactttgaggagcagcctcccagagctcgcccaggcccctgcagcttccatgctcttctcatgagaccaaacgactgcccagacacttagtaaattccttgtatctttggtttatatgaaaggaaaacagcttctgcacatttcatcttactataaatacccaagtgaagaaaaaaggtaaccatgaaggctcatcccactcaatttattcctgttggcattctttcagtggaaaaaaggaggggaaaaaaaaccctgcccttgagtaggaatgcaacatgtaaaaacctgtgctgaatcatgaacatgattattgtatgagaagattcaaactgaattgtaaaaacctcattttatagctgcttaaaaaccctgagaatagttgtacatggatctcagcaaacgtacaaaagaacacgcgttatcaaggcagagatctgcacacttgctagggaagacaagggtgatgcgggggcagaagatcctggcttggacaaggcaaggttccaaggatgaaaatatccctctgctggctgagtcagatgcatccacacatctgagtgccctctgtgctcagctgtcttagattcatgctgcgttgtagctgtttgtttactggacttgcctctctccggaattaagaagtcagattttgagggcagggagccagtcatattcacctttgtttccttagccctgatgccagtgtcagacaagtaagcgccccatgaactcaaataaataaagacctctgatctacattgtccagccatgtgcacctttttctccattttttcttcttttacaagtatttatattctctgcacctcctaacacagattatcatgagtccatgtacaataattttccccataaaactaactagcaaggattccctattcccaaatctgcaaatttcacaataaaactgttttgtgtgtgattcttctaccaaacttgtgactcatatttaaaatctgaaaccatcatctgcttcctatagagggttccctattcccaatgacacatgcccaaatgaagcacttgtttttcatggttctgatacacataaaacggtgacataaaacatatgacaaaacaagcataatactgttatggaaagagatgttggaaaattagaaaaagaattctgtttattgtgttaactacaattctaacccaggatttttcaaactttgaccacaacctacaataaaagcgctatatttcatgtagcaaccagcacaaatgtacataaatataaaactgcaacagattatgaaataaaaccatttctatttccaacatactcaaacattttctattccttttacctcattctctttaaacattgctgatgtcagcctactcagacaatttcaaagcctgacaatgcaaggtaactcatgcctgtaatcccagcactttaggaggttgaggcaggaggatctcttgaagcccagagtttgaaaccagcctggacaatgaagcaagacttcgtttctccaaataaaaaacaaacaaacaaaaaccacaaaagagagagagagaaaagacaaattagagtcaccaagacccatgaggtaggagacaactttaatgggaggcattaaagaacctagaatcttctgaagtcatctctttccatttcttctctctttggcatctccactcctgtggttttcttggatagcttctgtgtgtttgattcacgattcttttccatttcatgttacccatgtggctaaggctagggtgaaagctaagcaagacgcagggtggaacccatggagatctaaagaagcgactgctgcccaggcctgactgggtcagtacagcttcattcagaaaggcaagaggaagacttccagcccatctataagaaaccgggtcccaagccctggctagtgagaaagagtgtgtatatggcaactatctctgtgatgattctcctagaacgctgtccaacacaactgtctgccatgatggaagtgttccatatcactagttactgtggttaccactagctacaagtggctattaagcacttgatgtgtgactaattcaacaaaggaatgaattcttagatgtatttaattttaattaattgaaagctaaagagccaaatgtggctgtgacttccattgtggacagacatagcccttgaacctatcaaagatgggtaagagaagtgaggttgaaaggctttgggacaagtcagaatttgaagacattgatgctgcccatatctttccatcagatatttccaaggatgaagactgaattgcagcattttgcattctcaaatcttgaaaaagaaacaagaatttatggaaccaaacaaccacagagattcaactatgaaatgtattcactggtaataaacaattcctttcaactagaacttcagtgaaaggtgctgtacaaacagttgcatattcttttaacttgaggggaggcaagaatctagttcattctgaagttttggaaagacctaggttttagattctgcattgtcactgattcgctaaagacctggaggaggttatacgtgttctctttagcttctactgctactcatgggctgttgagtagcaaatgagttggtgtaagtagggaaagcactcaatgctgtggtttatggtagttattcacaacagtcaatagtgtgtgcactcaggcagatttgcaaataactctttcactctgccttaggataactacccattaaatcacataggtagaaagaaggccaagtttattcattttacatccctgtaactcccaagaaatgttgaggtaatcaaaaaattgtgggagataggataatctgaatagcaaatgttccaacttctaacatctaggcaactagtaagtcctgaaagctggaatatggctggtcaaaatcagaagttctctgaactaaaagacagtttcaacaaggtccttatccattagtgtatctacaacaaacaaagctaatgtagctatttagcactttctatacatgaggctctattctaggcacttgggcctcacaacaattctagtaggtgagttctattatgcccattttatagatgaggttaagagagagaaattgaaagcttaagtaacttgcccaagatcaacagctactaggaaacagtgctggaattaaacagagtgcatacttttcatccctgcatgaatctgccttgatacgaggagtggactctatgaggagggcagttatcttaacattttcacccaggaacttgtgtttaaaataagcatgttaatagcatcaagggtgcattggaagaactgaaaaatcatagaggactagagagaaagtagatagaatattatcaaaagagactaaagtattttaacattttggagttatttaatatagggacaatcagttccttatgtcttattaactcaacagaataatcaatgcagcaatgcaaatagatggcctagaaccataaagtaaggttcagttatcattcgaatgcactgttaagaaggcagggaatcattaaatcctaaatatagggaaaaactttgattcttaaaagtagtaagttttggttatttggatgattcactgtattgagcacactgcacactcatgtagaactaataaggcttcaattaacaaagcagattgatctcaatgtcctctaagcactaatactcaagagacagtatacagctttgtacaatcagtaggcaccaacacatcagccttcaagagaacttcagtttcaacactgctgttgattacatttttaaaaaatgtgctaaaataatgggcaattgaaacattctgaaattagatctaacacagtgaataattgctgtgcaagtcacactacattttacagactgtgttcttgcattaaacaagatgcagagattgcctttaaaaggtataattttctataatcttttttttgttgttggtggtgctcaaagcaattgctttccaatggaaaaataaagcaagagaacaatggtgcacatccccagacttcttaccaacatgtaaactttgaccgttcacagtatgcagttattgacagctggactaaaggacagtgtcgccattaacttaccgcaacctcatctgaaaaggagtgaagtgcctttggaacctgtttatagtacctaggtctgagggagcatgcagaggaagatttaattatcccatatgaggttaagttttaggccagtgccaactaggaagaagtattatagttagaaaagagactcaaggccaggtgtggtggctcatgcctgtaatcccagcactttgagggactgcttgagcccagaagtttgagaccagcctaggcaatatagtgagacctcatctctacataaaaagtttaaaaaattagctagacatggtggtgcacacctgtagttccagctacttgggaggctgagatgggaggatcacttgagcccaggaggctgagactgcagtgagccaagactgtgccactgcactccaggctgggcaacagagtgagaccctgtcttgaaaaaaaaaaaaaaagaagagaatcgagtgagaattagcatgaaatggggagaagaggggagtggggagggagtgctcaactgaaattcaatgctaagagagtaaagaatggattaattcaactattttaacagtgtacagtaaacattacactgttactcagtgtaatgcctacatgacctagggcacttggatcacagatcagcttcttaattctgctttactttaggaaacaccattcctgaagtcaaatcccctgcataaccaaactggccaagactggtggaaatcccaagatgctggcccacttgacctctgaagaacctctaacttcattataatctaatttccatgctaaatgacacttccaccagcaccatgacggttgacaatcactatgacaatagctggaaaaaaacataaaagaacaaaaaggaaagtggcaactctggttccaagaaattcgctgttcatttcaagacacgaacattcctccctttgcttttagtgcccaacccattcattaaagatgccctatatctgtgacttcctggctctcacaggctgagaagctgatctgtgatccaagtgcccactcaattccatggccatccgattaaagcctgcactgctcgacgctttcagttttgtgtactagctttgaagcaccaaacagggaaagagcccatttgggtgggaccagctttgtcagtaatattagtgttatgcctacaggaaatacaaatatgaatgaaacatagtcattgtagttggaaatgcatgacatatatgtacatatgatagaggcaggaggcagagaactctcctaggcagatagggaagggtccctgaagaatctccgacccaccccccaagtatttataccacatgttttgtgcagataaggcaacctgcacagggagtttgcctgaacacgcccagagcagactaagggaccatatgcacactggggggaaggggtggagccaccaggaattcaaaccttatacaaacagggaacccagcgccatcagcttggatatatagaagccctcgtattcaactgttaaggggggcaactggcaacctgctttcaggatccctctttttgctgagagctttcctttttgtttaataaattctattccactcactcttcgatgtccgcatgcctaatttttcgtggtcgtgagacaagaacctggaactagctgagtgaaggagtttaaaaaatcctgtgtcacatacacatgtgagtatgtatatacacatattcgtgttattatatgcattttggcagtgcctactatgctatgtgttatgcataaagtgatcactagaagagtatgcttcctgcccttacagaacaactgtgctagtaataaatcaactagaattgtgttatgtgctgggaaagagaagaagagagtgtaacttgattgagctaagcttgctacattcacctgaattctgattttgtgaactaaatggaaatgactagtaaggaaactccacaaaaatttgacctgataggctagaagggccccacaaggaaggaaagtgtactctaatgggcagttaaaggaaccagcctggccacacacttccaacaggactgtgagaattcagacccactccctcaactcctggaggagctgcccagatagatgccaccaccacacgggaatctgaaaccacataatttcagggctggacatggttcaaaaatcagcaagtagggttctgagtgaatgctctatacatataggtagattattacattacataattacataaaaaataaataattacctaattacactaggtaattatttttgactttagaaacaaatgacttgtcatcactacatgaaagacaatggcgtttcagtccaatacccttggtaggacttagagtggccaccactcctgggagggagttgcgtattcacctaggaagttaagtcttggggaggaggcttgtgttcccggccactccacagccggtgggggggaggacacacccacaaggcgtgggagaaaacaattagactaagattagagccatccaagctggaggaaccagataaggcttcttgggtgaggtggcatatatgctggttcttaaaagagaagcagaatttgaaaagatgaagaaagggcatgagatgaaaagatagcacaggcaaaatgttgtagttaaatagaaaggaatgtcggtttggctgggacacagaacactcaaccacggaaaaagagagaagagtggagatcacactagaaagaaacagggacaaaatcctttacagcggaactgggaaccactagcaaactttttctataaaggccctaataataaatatttttggccttgtgggtcagtctgttgcaactactcaactctgccatcatactgcaaaagtggtcacaggaaatgcataaacaaatagccctggggatctggtctgtgggcatagtttgcaaacccttctgtcagagagatgtgatctgctcacgcaccgttacgggggaactgctcaggcagaagaatgagaatccaggatgttttacagcaaggatctactggaagaaggaaggagtccaatgagtaacattaatactctgaaataatgaattcttgttattcacatcaaatggctacaagagcaataaacacctgagggaatgaggtaacaaggagcaaagtaactcaactggattcatattccatttgttagtttaagcaattattattattttcttaatgtcaagagtaaacatgcacaaaatatggttaattaaaccaccacgctcataggtcttgtgaaagacagcgagtagtaaatcactaatacagacattgtgcaaagcggaaaaataaacagctactatgggaattcaaaacaaagagccaccaactaaggaagaaaaggaagaattggccataaaaaaaacctgcttctgtttttgtaacaactttgaaagatgaataggaaagtttgtttatttccaaggtgaactttaatcaatgaactgttaacatcattaaatacactgaagcatgtgcaccatgtacttctgcaaagggcaactgtatgcaacttctgaatgcaactgccctcatcattcttgtaatctccaggaattaatcaaaaatggcaaatttcaggtcatttgatatgataagaatacatttataacaaatatattttgtcacatctgtaaatattccagaaaggaaaattctaaagctttcaactaagagtagtatttgttgaactattctcagcagaatatgacaacgtaagacaacagaattgtgatcataagcaggcgtctgaatgaaccagagaccagtcatttctttttctgctttgagaaacatttaagcaaattccagtgacaacttttgtggatgtgttttatagttacagcagaagacgacatgcagttttcctgtgcagaaacaatgtaaaactgaattgtatgtaaagttgttcttttttcaaaaatcagaaagtactacttgtagtttccctcctagctggacgcacacacatacacacatatacaattatttccatagtcattttggggatgagcgaaaacaagcaatagcatttctgaagcgcactgactaaatgtattcataatagtaatcaagtcatttactgaaaaggttctcaagaaatcacctggccatgacctgtcacttcagccaactgcatgtaagataatttaacgttgattgatactagactctcctttttttctcttaaagattctttgtggcccctgttagaagaccaccctaacatttcattatcttctaagatacagactaaaaaaaaaaggttcctttaatttcaactaatttctctttatttgggtctctggagaaacggggaaaacttgtcagactcatccttataaaaccctttgcacctctgagaatatgaactaggtctcacccagttttctcttttctgagctgaactgatctcaattttaacttacgtggagtctcacatccatcccttcagtagtgtctgctgagctggccagcttcttcacttcccttttgaatgtggaggatattagaaattttactgtggcctgccatcactatctctagcatgccagaacattcttatattaaaatcaggacacttcgaaattttaagagccagaaccatgtgtttactggaattttcctcaatgtctagcattttgcaaggtgccactgggagacaaatgtcctcgtgccccaagaggaaaaaccgctttgttcttgcacaaggctaatgcacagagccagtgccacccctctctgccttctcaacacccaacaatttggccttaagctcccactgcattctcaaatgatgttctaacagcttaatagagtgagtggcctgtttttggtcttcacatttcttgcagaacttgaccctgctggctctcctttgttgactaaaacgttaattttccatgtttgttgaggagcaacccaaattactgctcatcttttacatctctttgtttgttccgttctcattcattggctggtatatcccatatcaatggtcattttcatgcagtgaaatctacctcatctaaaaaacacaaccattattctaatcacctggtaagtgtttcacctgaatatgttgacaacattttgaaatatacatatacaagaaagagctatatttctcactaaccttcctctatttctattatccctttatcggttaatgctatcgctattctgtttttaaaatcagtcacttgtttctttctttccctaaaccttccctcagattcactgagttggacttacagatatgaagtactttattgctgataaaatatgaagctttgaaaaagttgttctattggaaaaaaattaattagaaaacaaaattaaatttagcaatagagcttggtgtgttccaaagcatggactatgctttcttaagtcttgatggatgttaattctttctctgagtctcaaggcaaagttccatttgaccctgacataagcaaacaccagaaatctcacgtgcattaaaaaaagctcaggcctgggcgaggtggctcacacttgtaatcccagctctatgggaagccaaggcaagaagactgcttgacgccaggagttcaagactagcctgggtaacacagtgagatcctgtctctacaaaaaatatatattttttaattagctgggggatggtggtgagcctatagtcccaactactcaggaggctaaggcgggggcaggcaggcggaattgcttgagtccaggaatttgagcctacagtgaaccatgaccatgccgcttcactccagcctgggtaacagagtaagatcctgtctaaaaaaaaaaagagttcagaaaggactctacacccatgtaccctggctgggactgcccgatgccccttccttcttccaggatgagtgtccactcacaaaacaccaagcaagcacccccacaacacacacaatagccaacctataattctccttaaatacttcttttttaagaacaccaactaaacgagaaccttaaagattgttgtaaggtgtgttttttcctccatttctccttaaggaaaggtggctggcatgattcagcatcaacatgccaaatattctatctgaaactatacactctgttagagtcactatttgcaaaacaaaactatcacactagtgaagggagtgatttgtgagaacaaattaaagacgcatgaccaatttgtctgggcagtaatgatgtaaacctgctgtaccactaaagagttacgcctgctgcagcgtcgagcttggattttctgctgtctaaatctgccgcttacgggcctgggtctgtgtgtctgagggaataacctgtcaaggaaatctcccacttacccacaatgaccaactatatgctgttcactaataagtattcatatagaccttacctccaaaaagtttgactataataaagtatccttagctcaaaattacacagaacacctcagggtcactgtgaacatcaaccatcgttgcacgggtctgccggcatgtgcattttggtgtgtgatgggttactgtgatagactgcatgctacaccatacacaattagtctgccagtaatgctttttcactttaatggtctacactaggaacagcactgcgtggttttcgtgaaaaggtgctccataaatgacaagactttttccttctctgaagaaatatgaaacattaaaaaaaaaacaccccaaagcccccaaaaccctcaagtcctgaagttacttctgtggttagcagtagaaaatggcaaaaggtaatatttaggtatatgtaaggaagaacatctgaaatgaaaaaaatatgagaacgcatatggaaagcagaaccgaataaaatagaaaaacgttttgcttaagggtagttttttctttgatatatgctaagcttattctatcaacttcagccagaataacttgtttacgcttgaacgtgtctctgccctaggaatggaaggtcattttataagatgtatttaatttctaatttgttttctaattaaattattttgatagcttctcatttgtgtcctctgatacaataattaactcttgatactaattgaaatatccactgaccctatgtccccaaatcatggactaccatgaacaaaaaaaagggtgacctctggccttcatgttcccaggggtgcaagagggttatgttgaaacatgagtttttttttgagcaaaggtcgtgtcatagtaatggcttaatatggtttttttcttttcttctttttttccttaatgaaaaggctgaatatttgatagaactgtaacattcattttatagctttggtatctgttgttgaaatagtgttctgagatgtgaagcttaaatattttatgaaaaatacctcctccaacagaaatgttaataatttaatatatgataaactacacatgaagtttcagaaacagttatttagtggtagttttatatttgatatgaaagcctagtagatcactcccttgctgcgtactttgatttaaaatggcagtttttctgcaaaattatcttagtataaaacatgtcactaattttaaagtgactttgattattttattttttgcctttaatccagagaactgagagcctgttgatgagtgatgccaacatgtcttgccaaagcatgattttgatgttaaatatccaaggccacacattgctatgtggttccatttagccaatacttcctaagacactggtgggtctctctagggcaggcgtgtgatttggtaagtcattgggagggcgaggagctgcactctgatatgtcctgacaggccctccccgcgaaggattcattggctctgaggcagttactgaaaagagcagctataatcaacagctgtgtcctgatgttttgccaatctgtgctcataaaacatgatgtttggtaacatatttccaacacagtttgcctttgtcttttcaacaccaaaattcccacttctgtattttctttcatctaagaatttctaaatagtttgagggcattaattatgccatacaaaatcctctcacagtaattactgatgttcctgcttcctaattatgtgtaataccaacaaatccactttctatactggattgcaccaacgctacctagaaatatctgctgccttgttgacaaataaagagctctcaaatgtagagtacagaatcttctctgctctgcatcttgcttttgcacattagattttggtgctgagcttctctatgtaaaatgcctcttctgtacacagtacacactttcccctttgaataggaattaagtttactggctacatttcttgatcaatttcagacaaaccggggctaggtatatcaaagacagttacagctgccaggaaattcaatttctatgtgctgtgcattgcaggaaatagaaagaagatctgtacaatctttactctcaagatgcttacaattgcacaagaagataaaatatagagcacagtgaaagaataagttccgttttccatgatggtgacaaaaggaaacagaaaatagtttgggagaagacacgcaggagagcaggagatgacaaaagaagctggatattctggtgataaacttggagttgaaagttcatctcttagttttactgacaaatataatgagaaacttgaaaaccctaaggggatgatacatgagccaggggatggacagagaagaaaactttgaggtggtcagctgttcctcctcactactagggaccaaatggagaaaaatgggcatgtggggatttagatgagagaaaaagaatacctttctgacagaaagacttattaaacacacgatggaacaggttagagaaggaaacgatgaagatgtcatctgtgaaagtctttaaaactgggatacagtttcaacaacctaaagaatggagtgaaagatggcacgtatagactcatggaaaccacagttaaggcattatggcattaagttccgacaattgaatgaaggttccctggatacctctgcctggggttctctctctaagaatgatggccacagggggccaccagcttcttttagacagcctcccctgccctgcaggatgtatctgcagggtgcccagcaaagaggagcccagattgtaaccagagaagcaaggctcagcttctgtgtgacatgagctgacaacactagattcacttgcagaatccttaacatatactcaatccacaaactcaagtttgacattattagacgtttatagcttttcagagctaatttaggatacttttgttgttgctattttttgagacagggtctcactctgttgtccaggttggagtgcagtggtgcaatcatagcctactgcagcctccagcttctgggctcaagagatcctcctgcctcagcctcccaagtagctggaactacagttgcacaccaccacgcccagctaattttaaaatttcttgtagagaccggtcttgctatgctgcccaggctggtctagaactctggtgtcaagcaatcctcccacctcagcctctcaaagtattggtattacaggtgtggcccaccatgcctggcccttaggaaacttcttcagtcatggatctattaattcaataacttcattgagtgcctcctctgagttaggtggtagacacagagatgcacaagacagagactaccctggggaagactggcatgtaaacagttaattatataccactgtgacaaacatcaggatagaggtaagcatagagtgtgtgggaagcacagattgtagacactgaccctagacagaggggcccagggaaggaccacagacagacactgggttgatcctagaaggaaagaggcagctgatgcagggggagaaaagccatctttctagataaagggcatggcatgattaaagacattccatgtcacaacaaaagaggattatgagaaagcctacagcaagagggaaactggcaaaaacaccatctagactagttctatttgccttctactgccaaggttgctttttaaaatatttaagtaagaccttcagccttgattagtgcatctgtcatatgaatatgtatttgctggctccctggaataatgtgctagacgcggaattcaaatgctctttcatttaccaatggctactcagagctgtaatcaagccaggtcgtcttatctaaacaaactcactaaatttagggatagatgtctaaatagaaaacatgattaatttgatcattgttttcctccaccataaacactcactctttattcatgacatatagtctcacatgtatacacacacgtttatacacactatccatccatcaaaaaagatggtatccatacaatcattgaatgtataatttgacaagctaaaactcaagctttactgaaaggcaaaaagaaggttaacggatcttttacattccctggttatgcatcagctcaaactgaaacgctcaaaaaagataatcgaggttgcctttttcagttcatcacacatagagagaggcttttgcagcatcatgttcagcaatttttcctctcaccttttgtcaacattgctaagacgctggctaatactaaatatggacgagatctctgctggagcccaaaaccaaaaattccacaaagtgatattaatttaacttgtagaagtaagagaaagaaatattaatgtatgtttagtaaaaacatggattttgacaatgttgcaggatctgtgcgtccactgtttcaacgcatgagactacatggtcctcctacccctcctgtcctccctcagatgtcagaaaagaagttattcacaaatacaatctgcacagtcctgtatcaagattcagagtcctcaggccaggtgcggtggctcacacctgtaatcccagcactttgggaggccgaggcagggtggatcacctgaggtcaggagttcaagaccagcctagccaatatggtgaaatcccgtttctactaaaaatataaaaataagccaggtgtggtggtgtgtgcctataatcccagctactcagaaggctgaggcaggagaatcacttgaacccaggaggtggaggtttcagtgagtcaagactgagccacggcattccagcctgggtgacagagatgagactccatctcaaaaaaaaaaaaaaaaaaaaaaaaaaaaaaaaaattcagagtcctcaacccaacccccaacttctctgggtcttttcagtgacttcttcccatttctctttttcccaatctctctacccttgtgaaagatttactaaaaagagatttttttggacaggcaattgctgttgcaacacaacattctcaagggttaagtgtaaacgaatcagaaacatgtggcttaaattttccacaaaattgaattcatatgggcttagatataaaagggaaaatagtgttttccaaaacatgacttgagttttgaaaaactccaagtgctgggaaaatagtttaggtattcactaaacttttaactacggtcagaatcactcatccatagtactataaaacttcattctactaaataatgtgtcatgctcagagaaaattacatctgtagagattaaacacccaccttcacaattttataaaaagctccaacataacagaatgagaatggaacactaaaggcttaatgcaaatatctgagacgagtgatttcttccatgtaatgtgcacgtgtgttatttagggaccttttaaaaatgcaaattttgattcagcaggtctggggtggggtgtgagagtctgtgatgctgagactgctgtgcatggaccaccttttgagtagcaaggactcagatcccccatgctgtatgtcacaactcactgcacaagtcagtttatgctctgttacaaatcttctgagattcatcatttggcgacaaaaaacaaacaaaaacaaaaacaaaaaaacaacaaaaaaaaaaacaaaaaaaaaacccacccaagcaaaatgacataaatgggagttaaaatatcctgctaaaaaggtacagataattgctgtgaaatttacataacaatattcactgattagaagtaatgagtaatgtattcattattacatatgaacaatgagaaaacaaataagaaacagtaaatattcatcactacctgctctgctactagtttatatcctactccatcgggaaatccttttatgaaatcttccaaatcacttcagacatcagagatattgcctgttttgaattcaagcacttctttgtttaccgcatgactaattagtcaggaatcgtctagccctattgcaggcattaattttgcacatatggatgccttattttcacaactacatctgaatctctgtgcgggtatcggctgtgtcttcctccttccgaaaaaccccgaagtcttgcaacatggcttcctggttgactgtgaaataaactgtacatcctgaataaccagagtactggcaaacctcagcttgtaatatttcaaggccatgcaataagcaaacccatgtccacggtaccaggatttgtggtgttcaggttgtaataaatgcagttctgtttgtcagtggggatcaaggtttgaggacaggaatgaactttgggagctgcatacaaaaacatccaatgatctgagaacacatgtaatacttatccacaggcttgatgtaaatattgtaacttttttcctccacctggcccatttttcatatatgcaactttacagggatcttgttaagatgaagaatgctataattttcctcttgagtaaactgaagtatagaagaaactaacttttacatataccacacctgtatatcacaatggcaaagctaggaaaagtgtttatcaaaccctccaacatcccagccatcattctcacttttctaagaggaagacactgatttgactgcctctctaagggcaggtcatcaccagcttctagaaaaccagcttacacacctgctactgaataagccacccagtcactgccctaattttccacatcagagctcctggcttcatttgccaaatgcccaaggcaaatgaagaagtttaactggtgaatgtggccccaggaattctagctatcatctcccatctctgttttgagttttgctacagccaaatcccaaggccctaggtccctatcaccaagggagctttacctagacactgctgcacccccaaggcaagatctgatatgatttcctcatatcagcatgttacatggttggtcatgaaagcaacatgtgctgactggtggatggaccgttaaacctctgtgtcagggatgtcaccaagcataacgatgcttcattaggaaaatgtacttcagcatacacgtggccaactagaaacacacttaggtgctctattctagtggggctgctcaaaacagactttcggaaagatactaccatcataaattcatccggtgagaattaacaactatatgcatgactactgcgttaggttgagcttgagaagagtgcaagtgtttttcccttactttttactgaagacacttgcaatctagatgggaagataagatgtacacacataagcaggtaagtagtttacagagccaaggatcccaatgcaagagatattatgaaactgtattcactacagaaaagaaatgcttgtgttacacattgaaggtcaggaaaaatgtgtaagaaagaggggaagagcattcaaggtcgggggcgtggagtcctgaaaccctggtgcttagtgcacagtgaggccacctgtctggctggcataaaagggacagtatcaggcaaaaatttaggttgtggatgaagtaaggaagtcatcaaagagcttgggttctatccagaagatgataatttttcaaacaatatttctcagaattctatgagtctacagaggtgcctcaatattctcaaaggctgatattaagaataaataaatgtggtgactttgaccttaaaataaatgtatactagtaaactaacattgttttgattgttcttctatattatggttgtatatatgattttactggaaaaaaataatgacactgataatgggaaaccatctttttagttatcacaggaaaaacagtatctgttattttatttataatacaattcgtttcaaaattaatttaagattcattgtattttttttcttcttaaggccaattcattgtattttaaaattaatacatgcttattttgacacctggagttcctcgtatctagaatggggaagtttttactaacatcattattaattgtatcaatctggctgcatcccattatatgatgagaactaattaaatcggagcatgtaccattatgggatttaactgcacatggtaaaaaagaatcatttgcctttatatacacaaaacccacattaacttcatggagagctaagcatcgagcagggctggcagatgatgtgcttttgtccttgaagactctaaagatagatattaatttcagttttgcaactcattcagaaaattgcctggataacttgggaaagccctgtttatgctttctgctagtgtgtgtgtacatgtgtgtgcttatgcctgtgtcagaacccaaagaaaccatgccagccataaaggaaattaaaaataaacttaaatatgcttccatatgccaatgcaggggccccagagactggatcataaacttgcacatttaaattgtctacatgaatttttgactcaaaaagtatactaagcaattttatcatcacagtcacataaagtaaaatatattttcacctggggaaaaatattccttaggcaagcaatgggatattttatttagacattcaagtatcagacaatttataataaatgaatgttctggattttaaagaggctaataaagcaagtactttcccttgtattagaaggaaatacaaagtgaatattataggatataggaaagggagtttaaaacaatcagttttatgggatgactgagaattttaaagtaaaattatatgaacaatttaagtgttaaatccccatatgtcagtttattcaaacccccttatattgctaaacagaacaggtgtttacgttcctaagctacctgcatcatactcataacaatctcttcccttcttactgaattgagacaattttcaaatggtgacttcagtcactcagcattcttcacacactgagaacaattcacaaatagataaattagtaggtaattagtttagcaaatatgtttctctaaaactttatttcatatttttgaactaaaagtgatcattctaatttgacatgatttttaccataaggtgtcagtataaaaaaaggaggctattatcatgccactaaaattactaggttttctatgcgtttgggctcccttctttgacgtattagagccaagaaaatgaagagttaaacaaatttaattttaatttcaattttaaaaattgtcctacaataaaatggcagtcactgacttctaagccaagaggatgcaaaaggagagactttaagtctaatatgtaacattattaagaaaaattggaatgagtataaataaaacggggacagggcagaaaagcacaggagattaaagttgtagacagatgtgcttgttagcagaaaatccacttgtttattgagagacagcctcaattagctgatggtggaagtagataatgtgtttattgtttccactttgaggaatggttttcttacgcatttccaacgaaaataatggccccagtggtgttgactttgtctctggggcagctcctgccacctgtaccgttccctataatctccactcccggatctcaggcttgccaatcattcctccagcaccattagaaagaggcctggacttctgggttaagagacttaggttttggaaaggctggtgcaatcagatcagaaaatgactacacttaaaaacaaacaaaaaatatagcttgcaaaggagtaagcaaggctgtgctgtggagatcaaagtcagccaatggtaaaactctaaatgacaaagccactgaactcccagggctttccttggttacaaaattgtcaatggaaagtgatttgtaattgtgcacaatcaagagtgtttttctctttaaagtccttccttaggagaagcaggttgtgtgtgtgtgtgtgtgtgtgtcagggtatgtgtgtgtgtcggggtgtgtgtggtgtggtgtacatgtgtgtttgtgtgtcggtgtggggtctgtgtttgtgtgtgttggtttggatgggatgatttaccctctcattgaaggaacctatactattattttgcttttattataaatgtcttggtcttacaatttaaggctaacatatacaggtacgctgaaggcaagaaagagcaaaaggatatataatatttaaaaaatataaaatatttcaaatttcaccatagcccagcagatgtggaaggtagtagcaaaaaataacccatgtgctgtgcaccgctttgaccccatgacttttccagcccctcctcatctccctatgcagctcctgtgctattatttttttccattgggagcaaaactctttcagagctttcattttcattcatgatctgatggaataagataaaagattagacaaataccccccaaatcagtttgacaagtattcatcagccagatttcaaaatgtttaagaaggaaaccctctaccttagacaaagtaattaagaagaagaaaaaaagtcattcttcgttctctccgatttggtctgctcactgggttgctagctttcaagtctgacctttccttgatatccacttattgtccccaaacctcaacccactgggcaattagaacgcaagactcgcctcccagggctgcctcgttttagtagaatgcatgatcaaggagttctcttgaaagggcaggaagcccacgccagtcaggagaacatcacaggcgctttaaagactggtgcctgcgaaccgctcatatccgcccttccagttaccagagagacaccagaaagtgggggtcctcgctttccttggccctttccccttaatctgctgcacgtgtgtttcttttccctgctgaggacttctggccctcagccgttctaatttcttcaactgcttctcgctttataaagttattgacacaaattactatcactggtccagagacatactattgcaggaaaacataacctaaaatatacatatcaatgtctgcataaggattttctactgaacttagctgtaaaaaaataacatatatacaggaaaggtttatgtttgacataagtaacctaattggaataacacacttttggctgcaaatctctgaaaatcatgcatttattagagacaaggggataaaagatgcattgtgaataagctaagccttctctaataaaatgaacactgacaccgatgaacttgcctctgacataattacctacagcaaagttggcttcttttattcataaatccaatttcagcaagcggaaaccctaaactttcagcaacaaaagaaaagatgaatttagatcaagacattccagggatcaagtcagcttggtcaacagcccaagatcactttgcaccacaaagacggaggtgccaacattttttaatcttttcaaggcaagataatgactttaaatgtccctgggcaaaaaagaaatgcaggagggacagcatgtttcacaaacattgacctttagcgtaagaattgatcccaaggaaaaacagggataagaaagtaaacctcctggatcctcctcaaaatagctcctcaaaatctgcaatcacaacggagaacagactggtcctgcctccattaaactcatcacagagatgctaaacctttaggcacagggtttgggacctacaaaggagtagacatttgccagctccaagaaagaaagaaagctctgtggtagaaagaaaaaacaatttggtgataatggatacaataattttaacttcccataatttgcttagtggtcacctaatagaatgctttcataactttaacaaggacccagagtattatcataactgccttaccagtgatggaattgaggttccaagaagataaatgacttggttaggatgtgacaggaaacaagaattagtgtcaggacttgatgctgagtcatggctgacggcctctgcaagttcacccagaccaccaggcaaacacactgaccctgccccaaatgcctcacctcccaggggaactgaggaaggcagagaagaaagcaagggaaaataccaaaataggaagaaaagacgtcaatatttctccctgtccttctaacacagaaatagcatatagggaattcatttatagcacgcatgtgcgtgcgcgcacacacacacacacacacacacacacacacatataaaatttagagactgtatttttaaatttattgcaggtcacagaggccctaagtggaggtatctataactagcaaggggctctggaaggatagccctccagtggaacatttctgctgtgtgaatgctgctccttctccaaatacccgtggataaactgccattcttctattgggaaagcaaggagcagagaatggtttctatcatcatggtaatatgagatacctgagtgtttcagtggaggaaaagcacagcttcatataaatcaactcaaaatgtaaacataccacttaaatattaatcaaggtaattacagaaaaatagtccagaaaatcgctgtaacaatccaagataaataaatgtcccttcgctaaaaagaaactcagaactcacttgttcataacctaacttgactttctttgcacaactcataccaaataccatatgcttggctgtatctgtttgaaatgaaattatctaatttgaatccagcgaagctacacaacatgcatattcaggtttatgaaaggagaagactgagtccaaggtaaaaaagcaaataaaataatcacaatatacaccaaactgaaccatattatattttaatagagcagttttctcaaccatgtcctttaggaaaaagcaaaagaggagaaagggcacatgtgcaggtagcaggtgtgctttaggagggactgtggttaaaatgccttattttttttttaatttttaatttttgtgggagcatagtaggggtatatatttatggggtacatgagatgttttgatacaggcatgcaatgtgacataagcacttcatgaagagtggggtatccatcccttcaagcatttttgttttttttttgagacggagtctcgctctgtcgcccaggctggagtgcagtggcacgatctcagctcactgcaacctccccgtcccgggttcaagcgattctcctgcctcagcctcctgagtagctgggattacaggcacccgccaccacgcctggctaattttgtgtttttagtagagacggggtttcaccatgttggccaggatggtctcggtctcctcacctcatgatccgcctgcctcagccacccaaagtgttgggattacaggcatgagccaatgcgcctggaccccttcaagcatttttccattgagttgcaaacaatccaaattacactgtttataaaactccttattaatacaggatagcaataatggaggcggagagatgagacaggctggttctaggtaactgcaggaaggagtctctcttgagtgggtttgagacaccattttgctgtgacagcatggtcataacttgagaagaacataaaaatgatttaacacatgaaaaaattattaaaccatttcatttgactcatactgtagtagaaacatacatgtgtgaacataaaaacctcaaaaattcacataccattaattcctacaacttggaaaaagctagactactgaaattggcttttctactaatttataaagttttgtgcaaatttgtggaaaatctaaatcaatgggaatctaaggaaacaactgccctcgtgtcttgctgggaggaggagtctaagtgctggcctgcttgagctctctaaagagaggggagttgagttctaaatgacaaaaaggacttctttaacatgagaaaacagaactgcaaacagaagacacagcaagtgcaaaggccctggagcaacacccaatgcgcttgtggaacaggagcaaagcccaatatttttggtcaccaggggagcaacaaacacaggtacttatgactagctgtgtgtcctgaggtgagctactttacctctctgagccttaatgtaacatggggctaattactaccatcttgatagactgttgtgctgatgtacaactgacacactatacctgtgcaacattactgctaccacaatataaatattcctggcttacacctgtatcttttaaggagaatattctgtagtggattttcttttaacaggtcattaacttcttgaggtacttcaaactaaagtgcaaagaccaatgacaacaccagaccaaccataaacactgatcagccagctctgaagccttaactcagtgggaagctatgatccagttaacaaaagttgggtttgtaaatcactgttcaaaaatacgtatctgtataacgaccagtttgcaagttgaaaagcattcatatgcaaaaactcagagggatgatgatattaatttttagtctcagaatttccctaccaagccatataaagtgctgtagaagaaatgagtgagaaaacataaaggatgctttcaaaaggcagatacaacccaaagtgtcacatcaccacaatctgtcattttctcaatatgtgttgagtagatacatacacagttttctattcttaatatttacaaatttcctctgaaattagttaacactagaggtctcctgcttgtaacagcaacaggtagccagtcatctttttggaacctgctgacatctggttacatgggattgctctgaaacttcatcattcaggaagttcctgcaggaaatattgtgtttgacctctatgcaaatgactctctggactttcagaaatcgctaccgacagtgcatctgatgcctccaacaaagacacagtcccaaattttaacatcaagattcttccaaggacagggtaaggatagagggaaaaggtgcacagttggaaacaggactcatcctcagagactgccccagtttatcacattaggataaaccgaacgtgtcagataagaatttgttgaatttacttcggctaacactgctctctttctgagtctataccgctgatgaaaagccagatgttttcaatctggaaagcttaacactaccgcacagcaaaaccagctggcagcagcctgaaagaaagtgcttgtcttgctgggaggaggagtccgagcgctggattgatggtccacagaccagacagagctcccctgccccaggccatgcctaccttgctgttctgacaggcagctccagcaaggacgggcctcattagcatcatctgtcctagagttcaaaatacttgaagagaaatattgatacttctttacacatagatttctctacatatactagttaactcgaaagtaacataaaaatgatttaacaaaaaaagatccacttcatctgacttacactttagtagagatgtatgtgtgtgtacataaaaacatctcaagaattcatataccattgattcctaccacttagagctaaagtgaaattggcttttctactaatttatacaggtttattgtgcaaattacttgaatttttgggacatctacaagaatgagaatcaatttcggaaaacacctggtatatccaacttttgaggacctgaaaagtaacctatctgttccattgtgatatcagccaaaagatcacgaacaaatcttatctattcagtaaatgcaaactccctcagtaccaccaataagtggcactttgttggtttagcttcaaactacatttcttaaaaaaaaaaaaaaaaaaagtcatgaataccaacagtcctttaatctaacaggcccgatttagtgagacgtaactattggtgtaaatgggttctcttacgccaggtcattactctcctctgtgcatagtgtctttctcatcagaaattcaaatatatacagcaatgtttactcataaattacatcaacattgcaaaaacatttcaattatcctaacatctatgtcagataagcagactggggaaacaaaaaatacatgatagagaagaaagaaagtatcactgagccactagaccaagagcagggaattgcttttctcatatataagcctttgggggataacccccaagtctaacggggagcaagaactcaaaaactcctatctgtcaaataaagcagtgactgagtgaataagtcaacgcatgaatgaatctctgaactgactattaacacagcaacagaaatactgatttctagtatgatccagctgctgcatatctttttgagacagggtcttgctctgtcgcccagactggagtgcagcggggtgatcacagctcaccacagcctccacctccctgggctcgggtgatcctcctaatacaggagttattaagaaataatttttaggcagatagaaagggtaaaaggacttcttgataagggtttttcgtttaataaaagcaacctccaaactgtttcttttctaacagaaaggcagcttgaagagccaggctggcaagctttaatacacaaatgcaggcgagtagaaactgggtctacctaacacggccaacatggtgattcccgccctcttctcaccaggtgtaccaagtgtcatggccacctgcggataacaccatgtgttcaaaacatcatggcgtctgcatttgcatattaaaagtctaaggtgggagggccaggttttcacggggctacgtaaataacacaccgtctcctccagcatcccaatataagcaaccacttttctgccgcacactgggtttctctttgttccaagcccccctcccttttctctgtatgggggagctgttctcttctttcttgcttgcctattaaactttgccctccttaaaaccactccacgtatgtacgtgtcgttaatcctatcggcatgaaaccaagaaccctggggttcctccagtcatcggagccatatcactccaacttcagcctcctgggtagctgagactataggtgtgcgccatcatggctggctaatttttgtattttttgtagagacagggtttctgctgtgttgcccaggctggtctctaactcctaggctcaagcaacccatctgcctctgcctcctgaagtgctaggattacaggtgtgagccactgtgctcagtctgcacatccttttatactgggaatagtgaactgaatccagaccttcacactgaggtttccgaccaagtataagcagagctttgaaaatgaagaggcgaacaacaggagaggaactgaattgttagttgatagccttcacctatggtcataatatccaggtttgtttcccacacagtctgatcaacattctaccttggttgttctttctcataaaaattccactcaacctcttcagctcccaagctcgcagtgttctctaacttgcatatccactctgtcaagaatcacttgccctccttcgtgattagttactgatggcaccccctggctcatagggggtttagagaattaattaatgtttgcaaagtgcttgtagatccacaagccggggggtattatataaatgcaaattattagcattattctgttttccaatggggcagactgcccagagcgtttattcatgccttataagaaaaccaaagtctctttaactaggtcttcctctgttcaagggattgtcgatttacaaccccagctcaccaacgcctgcacatcatcctgtgttccaggcctttcggtttttttttttttttttccctcaaggagctatttttgtgcccttggttcttatgctcaaagcctgcaaaagagatcagaacctaccatgaaaaacatatcccatctccagaaaggagcttcacatctcactttctcatcttttggaggagataagacagaggtcttgacttttagaaagttcactgcatcccttggtgggaccctgggaggccctggccaaattctactttgagtgatgacattctgctcaccccaagctctgtgctgcttcagttgcacagaggagtatttattgctacttcctgcccttgaatgttttgcagactttctctattctgtttaaacaaatgctgtgtttcacctgtcagagccccatcccctggaataaaggaggcccagaaatctaacaccacggctatcacttttagggcctagacccctggtttattttgttatgtagattggatgagctattaatatatcaagtttacatgtgtagtttctgtctttatctctgttatttgcacttcaaacctggaaaaacagttgagaggttatgtaagcattgtcctgggtcctgatctgcaaatttctttgccaacttttattggtctttgaaaactgcattcctttgtcctaaagaatgctgtctttcatatcctgtcattagtattatacaatgttaggagccaatttgtcatacagatctccaaacatacttaaaaagagaaaagggtctttaaattagtcttcatgtatattaaaaacagaaaaagacaaaaggaaaagactgaaatcttttaaagtaattccttcatttactggattttttttcttttttctgttcatgggctcatatctcaacagttactggatatttattgaattttatatgcaacacagacacggcatttatctttaagatattttttgcctctcatgttttagctccaagacatctaagtcactttggtagaaagaagccagggcaggcagtgcccacacctcctactcgaggcttcatttctgaactagagcagttacagagaacatcacaggaccctgagtaggcagccaggtaaaataataaaactgaacacagtaacatcttctatattatattatattatattatattatattatattatattatatttgcataggaatatccatattacacattatattgcagagttttacagtttaaaaagtgctttaaaatgtgcctcctttaattctcacaaccccaggggttacgtatcaccttcatcttacagagaggaaacctttgtttccaaggagttgagcggcatgtgtaaaattgcagggccagtgaaggagctcagcctgaacttgggcccagggagcagtcaggacttggagaaggttctctctctcaccctgcaacccaaacaacgagcaggggggaggcatcacataggggaggagatgcaggaagaaaaggaaagctcaggccacgaggacacaacttcctcaaaacccagccctaaagccggacggggtagctcacgcctgtaatcccagcactctggaaggcagaggtggagagatggcttgagcccaggagttcaaggctgtagcgggctatgattgcaccactgcactccagcctgggtgacagaatgagaccctcttaaaaaaaaaaaaaaaaaaagaaacccagcctgcctccaggatgctccccaatcagattcccaaacactgggattttcaggtgcaggctggaatttggaccattgtaccctaatggttccgaccctcaatctcacctcactgttggactgagagagccattctggaagaagtcatcaccaggaccacaaccagttgcagaatttatgtatcacagtttcttgttttccctctgatgagcccagagtaagctaccattcccagggaagaatgaggggagcagttggggaacaggaggaggacataagcagtggcaacctcaaaaggccatgtaagatgccatcctgtgacccgtcagcctctccttcctcttccctgggtgccaaggactcagccgtctgtctctgcccacagaccttctggtgtcagcccctctctcctgtattcttaatggctgaggtctcccctctccactccaacccttcccaacaggactgtgacttcctaaaggcaaaagcagggcttcatttttcttggtcttccctgtagagctagctccaagccaggcattccaaaaatgcctactgaattcgctcctcaaaaatcccaagtcaaaacctccctttcctctctcctgctgtttaattgatagtatgaactcacaattcagtgcttaagagcattaccttctggagccccagcactggcccagctgtgaacaatgagtggtgtttcagtttattgctacgtgaagtcttgggtccaagttttgggggtcccaggggtacatgggggtagagagtggagacgttaaagaactgcccttgaaagctgccaaatgccttcacgttttaccatttagagatgctttaatagcagcaagagacagagtactgggcaagaagtataacagagcatctcagtgctattgaagtggctccaccatgacaatgcagggaactgtcatttaaaatttccatctgttataaacatgtccaaaagtcccaggccagagcccacacattcctgtacccaccacaagtacaacaaaaacagatgcttggaagctccactttgaacaaaggcaggcccattcctagtggtgattaatttcttctgcatctcctctcacaggggggaaaaatcaaaccacaatattcatcaagacattgtctaaaagggaaaaacaacaaattccatgctagaaagccttagcacaaggaagtcacaaagaatctaaacaacagtttaggggagtgatgtaaatttagcccctaaaatgttttacaccttaacctcctttctgtgattcagatctcctcacgttttacggctaaattgacttacatgacattcactatccacattggcaaactgttttccaactgaatggagatcagtaacacgttccttctttttcctgggcaatgttaattatgctctccaaaggaaagcagcaatgctttgattttaaggtattccactaaattactttaaaccaacatagtcaatctaagatgaacgatatactatctctctaccgtggcgatgaaaaacttcctgtgaccctttctaggatgggacaactagctgtctgggtaaatatggctgcggaggaacgtggagctgcagataattaaagtgctttagaacactcgccaattgattttcctcttgtaaaggtagctcaattgaaatgttcagcataaatcatgtgttagaattatcttctgaactaagagctgagagcatattgattaataattatttgcactaacagactcaactaaggcaatatcatcaattacctcaaaaaattggctcagatcaatcacaatggaatcgcctgagttggaagattcattgtcttttgtttggtatttaaagagatcaacaaagaggcaaggaggctcttgaacacagtcctaagtaagcactgctgggttggttagaatcacttgcaattacttctgaatattatattgatctagacctttttaactcaggaatgtgtctcccacgcttccactgagtgggaggtctttagggtaaacaaacgttttttacttatgatccaggataacatgcagagtctaaggaatgcacttctgatgacaaaacacaaagacaacctgggccagaaaagaattgcccaggatacccaccagccaacggtacatgcacatacaagctttacgtacaccgacacatgtgcacacacacccaaattcattcacagaatagaaataatactattctgaaataataccagaaaatacttcaacctagtttcacacacttgaatgtgatttggaatgaaaacatcactccaaagggttgaagaatttggggcttacataatcatcctatattcatatggcaacttaaaatcgctttttttttttccagcaatgatgttcagttccaattttccaactccccagaagatgctccactgctccactctcttgccaccatggtcattccaagaaacaaatctgaccacagcacttctccccccacacccttcccaacacagcatggactctgcaacctggtatgaggggcctctgcttcactccagtcagtcccatggctcccaaagtgtggtctatggactcctaggggtctacaagatccttccagaggttttacgaggtcaaaagtatttgataaaaatactaagacatttcttggctgggagccatggttcatgcctgtaatctcagtgctttgggaggctgaggtgggagggttgcctgaggccaagagctcaagacaagcctgggcaacatagaaagaccctgtctctacaaaaataaaaataaaaataataaataacctgggcatggtccccagctacttgtgaggctgaggtgaggggaggagcccttgagcccaggagctggaggatgcagtgagccataacagtgccactgcactgcagcctgggtaacagagcaagactctacattacaaaaataaaaataaattttaaaaatgctgctaagacatttctttccttctttatggggttaacactttgttggtggtgcaaacgccataggggagggggcaaaacagctggcaacttggcacagatcaaggcagccagtgtcaccaaacgatactagtggtcactgcatttgcccctctgagcacttgaaggaaaatcaatgccagcatcacttaggcatgccctggatgaggcagtaagtattaatttggtaaatcctgatcctgagtaagtatcttttaaatagtctgttatgagaaggcaagtacatgtttccatgacctactgaagtatgatgtttgtctcaaggaaaagcacctgtgcaattgagttgtgagctgaactagccacctgcttcacagaacaccacttttcccaaaaaaggacaactgacaaaaacctgttattcagacttaggcatttaaaaagccattttcttgaaaatgagcaaaatgagcctatccctttgaggaaaaccactgacagtatttgttgccaatgataaaatttgagctttcaagtgaaaatcagaactttggaaaacttctgtctaccatcatgactttgatggttgcataattaagatttctgttatctttttttattgtatgacagagtgtaccatctgttggaggatttgcataactcagtggtctcacattttccaagtgaccaatgcatggtataagtaaaacattcatgggcaaaagggctattggaggtgcaagagagatgagcggttttaaggtagctgtaagaaaagttccctaaggttttaggtttcacattacaataactagtaagaaactaccacttgtcaagttttgatccagaaaaatatctgcaattagattgtattgtcttcacagacattaaacaacacaatgaatcagactgactaaaggagcaaataggaggatcttgttgtcttcccttcataagccagacacaaagaaatttctaaaaatctaagacaatgccactggtcttacaattttttattctgcacagttatttatataaaatgtattttataataatacttaataagttcattattgttcattttgaaggaataaatgatttttaaatttcccagtttacatttcagtgggaaatatcaacagatatttacccaaataataaactaaatgccctttgaggttctcaacagtttttaagagtgtaaagggatcctggggccacaaagtttgagaaacactgccgtagtcttatctctgggcaccttctcacccaacacaatttctgcccttgggagcccatggcctaaatgggagatacaccaggaaacaactcttcagtgtactgcatgataaatgctgtaaccagaggccgggaatgcaacaaaagagagcgtgacaaattcagcctgggagggtgagaaaagaaaaaactctctgaggagtaggaaagtgagtaggagttttccaggccaacttggaggatgccggtggggaggagcagagaaaacagcatatgcaaaggcacaaaaatataaatggcagcatggcatctcgcgggtcctgtagttcaactaggctggtgtgtggaatgcggggaggagaggagacatatgagtgcaatgttagatagagcccagaccccttaagacaggaaaaaacttaacaagggagcatcagaaaggctttaatcaggaaatgttatgtgagatttgtgttttaagaaaaagctgtttcatcaacggtgtggagaaaggagtgaggaagtgtgtgatgagatgggagagcagctaggaggctactgcataaactcaggtaagaaataaaaatggcctagtgatagcattggcaatttgcaaggagaagagggctgataatggcatcattaaccaggagagatttagagcggagaataagccactatagaggaaagttatagagctgattttggaatatgtcgactatggtgaatgtggggtatccaggaagtgggcagctagatgtagtctgtgctataagtagaggaatcactaacccaaccagtcactggctgagaggcagccactgaaagtatcaacgaatcaaagagggagaggagctctaattgactggaaggcatcaggcccaagtcccataggagaaaaatctcctggcccaaggaggaaacaccaactgtgacccttctgattaaacctaagtagacttgctggatatttggaaacagatgtcaccagccagaagatgcttttcaattcacagtcctgcatggtttggtctgtgcttcagccttgggggtgggggtgggggtgaagatggggtctgggagcctagggggagggaggatgaaagaagtctggcattgattcagaaggattcctggccccgctgaagagacagagcagatccaactccccagtgaagaacaacagtctcagcgtcattttctaattccccagctcagacacagacaggaacttcagattagggaacctgagtctaagagagaatttgtacactgcacatgatcaaaacttaatgaatgatttctcctctgtgaggccagcaaatagagactataggcttacaggctaaaacacgggctcagctgaaattggaggaatatgccatctggtagaaagcaagaactctcactaaaagaagtggaggtcagtggaacacttcaaaatcaggcattctgaaaactagcaaaaaccactttcctgcttgttttttttttttcctttttgagacagggtctggctctgtcaccctggctggagtgcccggctcattgcaacctctgcctcctgggctcaagtgatcctcccaccttagcctcctgagtagttgggactacaggcatatgtcaccatgcccagctaattcttgtttgtgggttttgtttgtttgtttttgttttgttttgggtagagacagggttttgccatgttgcccaggctgatctcaaactcctgggttcaagagaccctcccaccttggcctcccaaagtgctgggattacaggcgtgagccaccgtccccagccctgcttgtttttctatctgcccttttggttcttgtgtctgagacagaaacagcaccaaccttagaagacagtttctgtcttctccacacagatcttatatttcttcagtactttgcttgttgcttaatgcttcgtaaaaaaaattttcatctacttaaacaataggcttctaaactgagaccaaattcctctcctcctcttctgtccctggcacagctggaggttggactggactcacatggccccaaagagtaaaggtgacctcctggacgtcagagtgtggaggggctgttgatggcacaggccggcatccttcctgtcttgctcctagaatgttcttaagatccagggataactagatgcctgtgatctgtgttatctccaggctttctaagaacccatgaaatccaagtaccacgtgccatttctatgaatgggatagaaatagtgatccacacatccacccactctcactctcaaattatcatgcccgcctctctaagtctgtttttgaggtaaaggcattaaaactagaacgtatttttatgacattccaattcttagcttaaacccaattttaaagtttaactgaaccagggcaagctcctaaaactgatttttggagctttgaaggaaatggaagtactgctaaggacaagcttctcagaattatacaaaacaccttttgaattaaacaagtaaattctttccactgaagtatctaatttgaatttaaacatttctttacatgctaccttaattagatgcacgtttctctcagtatcttaattttatgcattttacacttctaagcagcttgctagtgaggattgcttatttgcattcatttacatacaatttgcaagaaatgttgaaaaacctagaaagggagagattgtaaattcatggatttttccctaaataaaaatgtcagttctatgaagaaacaaacagtgcattttttccccttgcttacctatagtactttcaaaactacttttactatttgtatacacaaagagatccatttaatgaatattggaataggaagattttcccctgcaagttaataacaatgatgaaaaaggctccaaacttctaacggccttcttaccaagaagatgaaacatcctcaagcagatgatgcctcccgacaaatattatttgcaaagtgcatcttctcatacaataaggacatatttgatcaattctgctctaaagattcattcaatttaaaacctatttcttttagcaatgggtagtttattctgtatgactttcgcttcagttaattggattttctgcacttccctctcttctcttcagctcgaatttatattcacaataattcctgcccatctttacaagagctctaagtgaagctggaggaccagcgtgggccaccctttatgagagaaaattcagttggctatttttcagagatggaggctgttgatactttcctggttttcaatgccctgaattttctactaacatcacaaactacggggtgctcctcctcctgtgaccctgggcatgggcttggacagggctctggaaatagatttcctatagcagctgcttctgcaaggactgcagaagaagcaaaatggtagaaaagcctccaacattaaaattttatctctccgatttcactggaacatggcagggagctcccccacccaagcttcataaataaccactgcacttccagaaggctctccctctacatattgagagtaattttaggttactgctctgagcttcacagaagaaagctgcttctccaaaataagacatactaagcaaaatttgagttgtgacattcttctagttgtaaaataatgttatctggcagatggagtttatccttgagaaacagttgaaaaggcagacgtggaagttgcccacccagagcagtaacaggaggcacacccaccactgtttcagaaagctcctgacacagcacacagcaggttcaggagctgcctgtgtggcccgagccgctcttgtacgtccctgtgcctcactcctcctgatgtaaaaccaagatcgcacagagaaagcaaaaaacagatgctgcacttgagatgatctctctaaagtaaacaaattagggaatttatgcatcaactgtggtttctggaaatcagttggaactgtttcgtaaaataactcaagacatcactatgaataccctggaatatgccaaagcttttttttttttttttttttcttaaattaacacttttttttcccctccatgttcaaggcagtgttaggtggataatggggagatggactgaagatgaaatgtgtaagttattattcatagtccctgaaggggatcaatctccatgcttaaaaatacttaagagtttcttagatagttatagttaaatacttaacagtttatagtttattaagaatacttactagtttactgtcattgaatacttaaactatatagctgaggtgattacatgtattagcaaaagtaaaatttgatgaactttatctaagataaaatttcaacttctgtttacttataaaacagatgtgccacattgggcctggcagaataagcctgtcctgattttgtaccttcctatctcaagatataccaacgtaatttctctatgtaaaattaataggagaatccaaattgctttacttcacaaataaatatgccaaacaatgtctcttaaggaaaactgcaatcaataattaacggagtagctgcaaaataagttgcaaaaagttgaacacaattaatccaatgtttatgctttctttaataaatattcatcttttctaatcctaacttcaagacaaacttaattatttttgtatgcccactttcagacttgtaataggatcctcagggctgacaggggattttcttcaccacactgagcaaagtgtctactcttttctttgttgttcaagtagtgcctggcacttagaactggcattctgtgcatataatgaatacaatgcacatgcacagaacgcctgctacaaatacacacacacacacacgtactaaaacgagtagtaactgacaacacacagtaacatgctaggtgcttatcagagaaaaatcctttaaacagacataatcaaaagaaacacatcaaaggcaaacacttctggagtgcttatgtattggacaggaaacacattctccatcctcaagaaatcagctccagtttaagagacaagatgtttacataactaagaatataaggcatcacatgttccgagaagaatgagaagggacagaaggtgacatagaggcaacactgaaaacatgtatttagagtcatgtggatgggcacaaacatcccaatccaaattttaggaagaggtatgtgatgacatcaaatagcacaggacagagtgtatcactgcaaacctgaaaatcttgccactcgctagctatgaaaatgaggccaagctccttaaccattacctcaaaccttagtttcctggtacggtacacgtggataacagtggtaactcacagagttgctgtgaaagtgaaatgctgtgaaaactaaacccacgtaaagggcttatgcagtgcctggggcacagaatatgcattcaagaaatattagctataatagaattggtttactttaaacttacttcaccctttcttagcccaattattcatacttctgccacttaatttgctctcatcatgactcttcctatccctttaatcaattctgttgctggcctgtgagctcctttgtctatagctttctagaaataagtgacccagacagagttctgtattcctgtgctctgcagggttacgtggcgtacaatgaccacatctccactttgtgacataatacataatacctttgaatagagtgctttaagctccgcttgttaataccccatcaactccagttaaagagcactctcatttgagagtcacttaaaaaaatcacctttattcttaatatcttggaatctccttatattgcactggttcttatgttgatgacaatttttgataccagacaggatggtcctagctcccatcttaaattgaacaatgcttgagagaaatgattttcatgacagtagtatttcttgttacttagttttgcctgtattgtcttttgagttacaaatactttgtacccttttctttttttttttttttttttttttgagacggagtctcgctctgtcgcccaggctggagtgcagtggctcgatcttggctcactgcaagctctgcctcctgggttcatgccattctcctgcctcagcctcccgagtagctgggactacaggtgcccgccaccacacttggctaattttctgtatttttagtagagacagggttacaccgtgttagccaggatggtctctatctcctgacctcatgatccgcccaccttggcctcccagagtgcccttttctgttctgattgctaatgtaggtaagaaggagaccagccctaaggcctgtgtctgggtgacagcccacgaggtgcctcccatgctaattcttttgatactggcgttactatgaaccgcaagctttgtctgtccatccacctcacgaaatggctggtggtatctggaggccagggaggcattatgctttgccatcctgtgccttcccatctgcacccactacacgagcaatgttcagctcaaaaccaagttaaattaatatgaagaatgcagggtcttcaaaaactgtgttctcctcccgatttaaagtgtgtgtatgtacacacacttagctcataatcttaaacgatctatcacagtgaccaaataccagctatttttaggaaaaatgcttgcttgcttctcaagattgagttggcttctgagtattcacagatgctcttcatgtgttaactactcaatctgagggaactgattggaccaggcctggaatgaaaccttcccccgactggtttttgtccacgaactcctagttcagaatgaacacttaggactacacgttctcctctcagaagaaacacaggccacccgcccattcccaccaaacaaacctcctcagcaatcaacctccaagcttccagcatgtgttcctttgtcaaaacttcaacaatgtagacatcattaatttgcatttaatgactttgggacataaaaattattccatcccttctctcttacttagactaggtgtatgctgcgtgagctaataaattcaggcctccaggttaccttaaagtatttttaacacaaggtaactagttcttcgtttgaattctccactatattttgctgggtaacctttgctcctactgcaggaggtgagctgttatttatttatttattttgagacacagtctcactctgtcgccaggctggagtgaagtggtgcgatcgcagctcactgcaacctctgcctcccaggttcaagtgattctcctgccccagcctcccgagcagcggggactacaggcgcacgccaccacgcccagctaatttttgtatttttagtagagacagggtttcaccatgttggccaggatggtcttgaggtcttgatctcttgacatcgtgatccgcctgcctcagcctcccaaaatgcaggcatgagccaccgcgcccggccgaatctgctgttatttaataagaagctaaaagtgaaaaatggttttcggaccttgctattcacattgcagcttctaacattaacaatgataacagcaagattcagaaattaaagttgtaaaaaattcaataagccaagcaaatagatactttctagccaattttaaaatcacttcattttttgatcttaaggaaccatattaaattcaggataatgcagctattttaaaaagaagataaaaatcacacataatgctggtgattatgagtttcacatttttgtctttttttctgtaaacagtcaacattcacttagtgactcagcaaaagacagatttatcatatttcactaagttccaacctgggtaccaattttaactaaagttaattaaaaatccataagaatgcctatctgaaatcactaattggtgtgtgtgtgtgtgtgtgtgtgtgtgtgtgtgtatgtgtgtgtgtgtctgtgaagagataactggaaggatgatcctagaagatgtcagtgggtagtggggtcattattattttttctttatacttttctgcattttagaatatttataatgaatgctgccaccttattttaaaagttaaaattattctattttgatagaaaattttcactacctgtcattttgttttacaacagtcaactgaagtgcaccctgatgtcctttacagattacaaaaattgccccaaacagtcaaccccttagaaaggtgtcagaaaacaggcaaatacagagggaaagtcaaacagtcagatttaaccccaggcctcccatgtatttgggactgtgtcacgatgggtgatcattaatgctcaggagccctgctccattgtggaacagctgtaacaacgtcagaccaatctggttcaacttttatgcaaccaagctgtgagttgcttttcagttgccatggactctcaggttaaaggtcacaaaacctgggcatccctagatgatccaagcatgcaaccatgggcagaacctaagcactgggaccaaggaatgggactgaattaagaagtggacattacatggcaggatccaggatccaataagatggagctctggcatcaccccatgacaggatccaatcagatcgtgcctcccagcatcacctcatctcaaaatccaatcagatcggacctcattatcctatgctcataaaatgcaacccaggccccagctttgggagatagatttgagcatatcttcctgtctccttgtcagtcaattcacaattaaccttgcttgctataaaaacctagtgctttggtgtttggctttctgttgtgaacaggcaaatggacccagtttggttcggtgacagggcttagcctggagaagccacaggcatctcacacgtggagctggtgtgaggactaaggggtaattgccctaagctgacaatccccagtggctggtcagtgaaggcagagctcagagttaacgaggtcatggccatggtttcatgagggtgaccagggagctttgttttgccctacagccatgggcggcacccccaaccccggttaccttcagcaaagcctggcctgctgtgttaagcaaatctgaaaaacctgaataaaagcatgaatagaatttaaaaaaataggagtatcaaacatttacttcctactagttgtggagcaagagcacctccttcctactttcaagaataaaggatgcaagctttcccttctgagcaagtgattaatgagaaccggagaaatcagtaactgggccataaaatgaggcaagtccctcgttagagcaatttctacctggcttctcctaggttctttagcaacaaagactattcgaatgtgttacaactgcccgaccccaaaaaaacagaataccacatccatgaaaaacggtttagtgattccaggatattgtgttattatcctgagtttggtaaagtagaggaaatcatcttgacagccatgaaacatgattggtaagtgaagatcatggtcaaagaaagtggatttttataaatgaactatctttgtgagctatgatcatgtagatcttggttacaaataacaatcataatcacaattgatctctagttatgttaagtggcttcaattcattatctcagttcatcttgaaaacaaccttgtaagatagggagttttataattcttctttcatggaagaatatagcttatagactttaagtaactggtataatgtcacctagctaattagaggcagttagagcaagacccgagactgctgacttccaacacctcttaagcaataacaggaaaaaaaaaatcttcgttttcctgcagacagtaaacttattgggggatggctgatatttgtggttgctgcccaatggaacttttgccaaagactgaagagttaacaaacccgcaggagaggcaagaaatgcaagtcaggaaatgaatctgtggcagcagatggggtctatctgtttccttgcctcatctctagttaaggagtcttagtctgtagcagaaagaggaaactgttgccagccctctgcccatccatcacatggcttagtacttactgaaccctgataaggcatcaacagcacatcagtgatggtccagccactcactagatggacagtaaaaaatagaggactagctgcagacacagagtcgtgacaacaggaaaaggaggggacaaagcattagttactaggctactggctctctccactctagggatattgctgcattatggaacaaaagctcacatgcagacgccagggctataagagcagatggtttttcagctggctgcagtggtcgacacaggcatctcaatgaatgtagctgttcctgcatcagcttctgctatttcagaaacagggaagacactgaacaaactctctggcagctccttggcaaccccctgccccccactgcctgcctttcctctctccaatgtatgtgtgagtgcctgtgtatacatgcagacacacgcacctgccaaattatctttataaactgtatctgtttacagggaggcctcttggaatacgaaaggcatgggatctagagacagacagaactgggttccaatcccatctctatcaccatgtactatgggccactctgagtctttaagttctcatctgtcgaagaaagatgcagtcatgtaccttgggggagctctgaggataaagggaaccaaggcaggttactgagctagcagtgtggcataccgcactcaatgaatgctgttcactaatacttctgttcgttgctgcttcaagaaaggctaagaaatcattttatttccactgaaaaacttattggaagggaacagtattctctcattatttaaaagcagtattttataacaaacgcagatccttatctcagcgtaaaaagtttatttaaataaattatgaagaaatcaaagagaactataattagaaggaaatgaaaagccatctatactaagggcatagaatgctttggagagagaagtttcagttgttggttcatctcttcagagtgctgaaagtgactctttcaaaaggggagccatgttttaaaattttatctttaaattaacatacagtaaaatggactttttttgtggtatgaagttctgtgtgttaaaattcaaggagttgttcacccaaaaaagcaactctagggtatgttaaaaaataaaatgaattttaacacatcaagagattcatgtaccaaccacaccatcaggatacagagcttccattatcgtaaaaactaaagggaagaaacgtcgttctgtttcgcaaacattcactgagcactcacttctgctgaccttgtgctggataccagggaggaaacactgaatgacaggatccccaccccagtgcaccattgctcttggaaaaaaggatcagggggcttgcaaagtatcattttttgttttcatttttactatttttagccagtcagattttagcagtggggggttaacaccaacttttgtgacactaacattaataagttctgataacccactaccatcgaaccagcctatttttgttttttttagagacagggtctctctttgttgctcaggcaagagtgcagtggtgtgatcacagctcactgcagcctcgacctcctgggaccaagcaatactcctgcctcagcctcctgtgtagtggaattacaggcacataccataatacccggctaatttttaaatcttttataaagatgggatctcactatgttgcccaggctggtcttgaactcttggcttcaagcaatcctccagccttggcctcccaaagtgctgggattataggcatgaggcactgcatttggtgaaaatattttaaagacttctgaacatattcattacgtatactttcaactttttacagataagaggtgtgaaagagcccactgagattgagagccactctttggaagaggaaagcatcatttctagtccaaatgtcacactgcataaacgacacaggcatgttaacagaggtacagaaagctaagtgacttcaccacatcacacagatgatcaagaaccaggcaagagactaaaactttgctcaacatatctgagaactcaataaaacattctcttccttttactccctgttgattttgcaaagggtggcatttcttatatgcatcaatatagccaaattacattctagaatctactctttatatgagtttatctccaatttaataacagaaggaaaaagaagggtctaagtatgtgcttaatatgttgctttcctggcaatacttgaggcacaatacatgaatctatttcccttactgtgacacacaaatggctcagattcagaaaaaaatacaacagtaaaccctctcagtgacaatggctgtactgagctggctgtgattgagaagcagccacaatgtctggcatcctgagaggctagaacttcaattcactgaggtctgcacttgaacacaaccaaatgggcacagttaccttttgctaacacccccactccagcaccctggccccactgccagctgcagccccatccccagtttctcgctctgcctgtgccaagaaaatatgatggtttagttttgaaggtcgttttatggcactttggagtgtgggtacactgcaagagagagagagagagctctgtttctatttgcctccgccaataaatagaaaagcaaaacacttcaatctatatgccaaaccactgaagaatgaaggcaaaatggattaatcacccatagctcacacagagaaactctcattctagacacagatcaaatgaatggctgttctgaggttaggaaagctcccactgactcccagccttctgcattcatctgcaaagcttctgaagctttccaaatacagttgtctcttggtatctacggggaatcggttccaggacaccttgtggataccaaaatccacggatgtgcaagtctattatataaactggtgtaatatttgcatataacctacccacatcctcctgtatactttaaatcatctctagattgcctatgatacctaatacaatgcaaatgctatgtaaatagttgttatactgtgctgtttagggaataacaaggaaaagaatatctgaacatgttcagtggagatgcaatcattcattcattttttccccgggtatttatgatctgtggttggtcaaatccatcgatgcagaacccatgaatgcagagggccgactgtatattcagagacaagtaccaccaggaatccacacacctgagttctattgatctgtcaatgcctggttttgcaacagcagaagacacactcaagtaataaaataagggataatgtgaagacattttgttcatgtgcaagggaagtttgggagatatctaatgtctttcaaagaaggttctaaatgcctcaaagacgcctctcatgttatgattaaaactcagtggcagctagattgtagttataattttcataagtcagagttctatcacttgattagaggtttctgaatagtaaatgtgttgactaagcctagatctcacttagcaaatggaaggtatgtagaaaggtaagtacatcaacatttactgatagtgttgacagtattgatgttaatgataacgtattcccttttcaaagaaagttgcaagtaccgtgtggaacctctattaacctcaataggaaaggcaccaagttcaagaggccaaaggagagacccagagcaagcgaatgacacatggggttttattagtggcttacataaaggaaagagagtccagtggcagtgggctggacaagataaccaccttacatatggtccagtggtggcaggctggaaagcataacctcacggcgcagtgttggcaggctgggtaggaaaaccacaaccacttgcaaacagcatgcagtttatatacagcgttttcacttaacaccctccccttaacgacctccaccttgcaaccttcatttaacccaaaactcagggccccaatcctccatacagcttgtgttcaacagaacaggatgggggctcagatgttcttcacagacaaggaatgaatctctgggttggctactcctggatgccctaacttggaacacatattcagatgcatctgccatacaggatcatcctaagggtgtgcttacgttacattcccccctacaataagaggatctgaattcattttcaaatcatctttcttgatgtaaacacaagccagcataagattttgaattcgtggtatctatattatgggctcataagcagaaatgtgtgacttcataagtagaacacttgtttatttggcaaactttggatgtgcttctcttatacctaattacaagtccattaatttttataatcatattaaagaactccaataaaactttcaatgactccaggggaaggtagttttagacagtcaaccgtaattaagccaaacgattgtgcctgcatcattatagcaactatagggagtaatttgagtctggggatgattatcatcaaaaaagttggaaaacaacacactgtaaacctttgcatcataagcacatttcaccaacatcagcctcagggctctagtgaaatcagttaggtgtgttatacacctgctggaaaaaaaatctttgattttgtatttctcaactaagagacatctgatgctgaggtcactgggactttcaggtgagaatcagcaggaaatgagatctttaacacctgtttgttgaacttgcctaatctgactgtatttagcctgttatgctgacatctgaactcaattgataaatattcctatctggcctaaattctcttagcatgctagataggccgggtgaaatgaaaaatgttttcatgcgttagaaaacaaattaataaagcattcaaatctatctgcagtgtttttaaaaaattattttaagaaaaacactcctctgttcactttatcagttttcagaagtcaaatccacaaaccttaatcctgtatgagtgcggtaaggtgtcagatgcaatggcaagcagagggacttgaattttgaaagaagaatgccaggctctaagaagaggaagtgggcggccagggagagggtgaagcgatgtgtgtggtgaaagcctgggagctggagaggaaggggatggcggcagcagaggctgggcctgaagatgggcagggactcacctcctgcacttcctcctgcctcttcactttcctagcttcctctggggtcaagaaaaagccacatatcttaggattttgacttgttcctgctgtggccattgtagttggcggcaggcagaccaccacagcgtatgctccggatacagtccccccatcccctggggctgcgcatctgatggctgctgccactaaactacagcacttcatggctgaggaccgatgctgatgttgggaggaggggcagcacctgtggctgtgtggggtcttgcctcctgcctcactactagatcgaggtcttgtcccatacagccagagaaaagcagatccacatggatcatttaaaaaaccctttcacatgtataaatcacagcagtcaagcataatttgaccacctcttcacttaagtccatggaagggaggagaggcacagtgggaggtcccagtgcaggtgtggaaggtggctgctgggccaggaggaacaagaacagtggcagtcagtggcacaggctgcttgctggtccagggctctagcgcccctagctattcattgcacatcttcagcatattggggtatgaaaccagactacaggtctcagatgtcattcactatggtgacggtttcagcaaatccagcacaggtaggaaataggaaatgggcggcgtttgcctggagtgagccccttttatggccttccttgggctactaagatttgtcagctcctattgatgcaggacaggcaagccccaaaactggggcttagcccgggaaggttcttggcttcactcaggaaagaactccagagccagtcggtgatagaaggaaacagctttattgaggacgcagtgttgcatctccctgactgctcctgcagagcagagctactccctgggcagtgggtggagagaagcagctcggagcagttctgcagtcatgtttatatccacttttaactacatgcaaattaagagatgggttatttacaaatttctagaaaaagggtggtaacttccaggttgctgccatggaaagcagtggaaacttccaggtgttgccatagcaatggtaaaccaacatggcactggtaggtgtgtcttatggagaggtgctctcacctcttctgtttcaaccagtcttcagtctggtctggagtaaagtctcacctcctacctcactactagatcgaggtcttgtcccatacagccagagaaaagcagtatcacctataatttcacaggatcaatcctggactctagattacacagcttcatcaactgacaagcacctagctgtcactgtgtgcccagctttaagccaccatctgccatggtgtgtgctggcacacaggtatgctcacctgtgtgtttggttgggatgggtgaggcctctctgcttacaatttaactaggaaaacaagacttatcaagcctacatcagcaattcacgcctcaaatacttcctcctttatctcacacaggggctcatgatgagttaaaattcagtattctgattagctcccattcaaatggttggttgttttgtcactcttgggtggggacaaaaaggtaaccaaatatattttaaaaataagcacagcagcaagtgttttcaataagcaaccctcaccctaactgctgagagatggagctgatttcctacatctctcagcattaaagtaattgaatgcaaacgagtcaggacacagaaaaagtgaaaccccagccgtggggttctggcaaaagcatttccaatggtgggagtagaacaactgtccctggtcctcagatggagtgtcagaggtcactgcaggctgggacaccatggatcaagtttcactcacttcaggacaaagcaagttacacaaataaggcacagaatcatttaagggttaaatgtgtactctaccttttcttttaccaagatgatattttcaccctttttacaaatccccaaaaccgcccactaatgaagagacacagtaaactttatggacattccaactgatatttaccaagagtttcgttttaaatctcttaatccctatgttaaataggaaaacccagcatgaatctagtttttaaggtgacacaattttctttagaatgaacaacatcgaggctttgttagaaaacccagaatgactgattttaagaagaatgcctccggtcctttgtcagaaaatagacatttttctgtcaaaagaggctgttatctaactttctgtaaaagagaaaaaagtaatgagctctctctggataatatatgcctgaacttctcatgcaaagaacacacctttttatttctcaaagcttgaatactgtctgtggtgtaaaacaattttaagtgcctttgctaattaataggctgctttagctacacatcagcagaattgcattttttagagacataaccatgaacacatgatttactttttttcttacatgtcttctaaaaaataaaagtctctgtcgtggacacaagtcaaatcaggttgtcatgaactactctgcaaagtgtaaataataacattcattaaagaagaagtatttcagcgaagaaaagtaattggcaataaggatggtgcctaagtgaagactgtctgcaggtggcctgaatgggggcagcagaaccaaattatagaggctttgcataactagttatccaattgttctataagagaacagcactattagtgacttctcatctaatgttgctaacatgtctcttcaatcttatgaatccttgccaggaccaccaggggaatgccagcctttcagtacgtttttaacaaggctgtttactaatagatcacacctcatggcacaggcatctatagttgatttcttgtgaaatcattttgcagagggttaaggacgcagagaagagaggtaggcaaagatggctacagaaatgtgttaagcgtgacccaacggtcccctagaactgctcatgcagggtgagcgttcaggaaacaggagctgtaccacccagctatcagtctttgtgaacctcaaggagccgagggccatcagattcctaggcagccaggtagctatcagcatggtgtggggcaagcattctgagttcctttcagacatttaacaatcgagggttttgatgtcattgaaaaaattaaaaagggagcccacagttcttcaatgactattaaatgtttgaaacctctataaataaacagacatgttagaattactccaagaatttaaatacctcaagttctttaagctttcagaaatatacttgtctaatagatacattatggtgaaaagagtatttgagaatgaccattttcatgcaaactaaaattccacatataatattctgactaggaataaaaaatgtaagacaaagtaaactttaactagagggaaaaagatgacttcagattttctttctacttgggtgacctagaatcccttcttcctttaattctatttcttgggtcaagagatgaacagcactttcactgaaaaatgcactggttgtttgaatgagaaacaaacttcatttcacaggaaatttctcatcaaaaatctagcagaatatgtagttggaggttgatttggttatcaggagcaggagccccaaggattcttttaatgtcatgctattaaatattctcgacatgaacaaggcagagctgatgtggagatgtcatcaggggcagtaacggagtttgagcgaggaagagaattgcttcaagaagccaagtatagttgattctgtcttctgtgagataaatgatattaaaattaatgttagatattagtgtgttgtggggggcagtcaaaaattaacaccttttataaatggagaaaaatattcctcaattcagttttcctaaccaagagcaaagaaacgggtcagagagacataggttcaaatcttggttcccaccaattactagctatggggtcttggctgagtcacttctccaagtttctacatattctgtgtactgtaatgtggttttttaaaaaagtgcttacctcacagggatgctacagaaaccaaatgagaaaatgcatgcaaattcttgggagagaaagcatttagtaaatgttagctattattagttatcattaacattattatttttatcacaaagttgttataatgataaaactgtatcaggtaagatatttatggatagaaatccaaaataagtcaccactttaatatttatatgtaaagttaatcctcagttaccaaaaatcttacctagtggagatgagactcattgaatttctaatatattttatatgctgtaaatttataaaattagccatacattgcaaggctaggaagttttagaattcataacaaaatgtgaacatgtgagtgatactgtgtctttatgaaatgtgctcaatgcgaggccaggactaagaacttcccaacatataacatataaacacctatcttctctgttatcataatcaatgcaaaaacaggtcatgtgtgcactcacacatgtattgtacatgtatgtatgtgtgtgtgtagtgcaggtggtggagagaagaggaattggaagagtatgaggaatatttgagttttcttttattcagtaagcttgtggtttaattcttccatgacatgttaacataaatcagaaccactctttcactagtgaattgccccacatactttgcgtgtggatgttggttgagacatttggtgggcagagtggcgatggggagtatttcttttagacaccaccttctgcactggagcctgctggcctgtggagtatacgtaacagctcaaggtgttatgacctttctacttacaaggagaagagatacatccggcggtacaaagtggaaataattgatcattctctcctgattgacatagtagatattaatgatcaaaaacttgatacctgggaaggtgctcagactattcaacaagagtgactctaactctgtggtctcctagaggaagttcaccacatcactatcatcacagccacagcctggacttggttctcaggaaatagggtgtctgggatgatttcaaccatgtaatttctaggaaaactagaattcagtgcacaatggtcatttaggaatacagacaattgcttcctgacttgacttttcaacacagtgtggtggtaaggggttggctgcacactctcctatgaccctgtgcccccaatattaaaggaacgtactgtttttcacctgttcaggtgacacctaccaatcataagggaggacaggtgacatgtttatgggcttaggaggagtgaggaactgtgtcaaggtctttgcatgtgttatctcattaacacggattaacagaatctacttcaccgggttgacgtgagaattgagaacagatacacagctcttcagcctgtgacaggctcatgaaacgcaccgataaacattcgctctcttccctggacccttcattcttgcatttctgtgagggcagagcaatcacctccaaccaagagatgtggagatgtgtctagggtcgtaaagattagaagggggctgcataaggatttgggcccagttctggcccgtgtgaccccaagccctggtaggcccttgcctctgccaagtcacctcctacaaagtgtgtgtttcctctttcagatcacagttaggccagcgggaagggagtgaggatacacttacaaatgctcagaactgagtggggcatacgcagagagaaggcagaagaaaaagggaaagcagaaacgacagaggaagggagcaaagttctagttagaaaatggaggccgggagtgatgtttcacgcctgtcatcccagaactttgggaggccgaggcagacggatcacttgagatcaggagttcgagactagcctggccaacatggtgaaacctcgtcttctaaaaatacaaaaattagctgagcatggtggtgggcgcctgtaatcccagctactggggagcgtgaggcaggagaattgcttgaaccctggaggcggagattgcagtgagccgagatcgagccactgcactccagcctgggtgacagagcaagactccatctcaaaaaaagaaaaaaaaagaaagaaaaagaaaaaggagtagagatgcctgttcctctccccaggagtctcactgtctgtgagcatatcagtatctccaccttcccagggttatcccaaagatcttcccaaggctctttctggtatttggggacactacacttccttctttccatcaagagaaaaggccactttttggtatatcacgtaagatgttacttctttggaatctcagagtgctcaactttttttttttttttttgctcccatatatttctgctctattttgcttccatgtgtatttctgccctctcctcccattcttgcatctactaacttaagtatgctcaaatcgctattatcctaatttaactgatgatgctatcaggtgatccatgctggggaaatcaacacttaccatcatgactcctcccccatccccgtgactttattcccctgtgttcccacaacttctccagtagagatttctgaaacatctctaataaaatcatgtcagaacttgaagccctgttatctaggtcattcttctggatctggtggttgtcaacacctctctaagcaggcttcagtttttctcatctttctagcccgacccctgacagcaatgtctgctagctcaaattggtattgttattttgtattctgctcttttcccacagctttgtttccatcattcaaaagtctgaatactctgctaggctatgagggcacagatatattcagaaaagggtctcacttagggaaataactcccaatgtgtcaccataaaatgttaaaaatacaaggcagacaagaccaggactgtacctggtgcgccctacagcccctcgtggagtagggaacaatgggaaggtcagttggggcagggggggttctgaggggggcaaaggccgcagaggtggatggagttctgtggagcagcttgaaaagccattaataaatcaggagttcaacctggtcagaaaacccttacattgaggatgaactggaaaaaaagaaactcatgattaaaaaccagttcagaggccttgcaaacatccaggagagtctaacttatcttcaccaacactgccaccaaacctcaggctcagaggcatcatcagaacattcttctcgaagccccttcatctttcttcatctatttcactcttaaaatcagcttcagtcaccctaaaaattcactggcttctctttgctctccacactatcttaggcctttccaaagcttgcccaagtgttttatcacattatcttactctgttttgtgttactatcacagaatacctaagaccatgtaatttacaaagaaaagagttttacttggcccacaattctggtggctagaaggttcaagattgggcagctgcatctggcaagggtctcagcctgcttcaactcatggcagaaagtgaaaggggggtgggtgtgtgcaaagagaccacatggcaagagagaaagcaagaaagagaaactgaggaagccggactcctttaacaatctgctttgctgggaactaatccactcccaccagagcaagaactcacccctatgggagggcattaatctattcatgaggatctgcctcagtgacccaagcacgcccaccatgccccacctcccaacaccaccacattgggggtcaaacgtcaatatgagttttggtggggatgaactatgtcctaaccacagcgcagatgaagccaacctttatttcattctcacttcttacattccactcaggcctggaaagcctattggtctaacttgactcagttaatgattacataaatgtttacagacaattataagggtttggtttcctatttggttatgtgggaggtgtaaagataaaagagagaggccttcaaagggctctcaatcctatagcagagataagatggctacatgataccagggataaaggcaaggtaaaaccactgcctggcagcagaggacaggaggtgacgtgggcagtgctgctccacgattcatgaatgtttcatgtgataatgacaaacgattgacttttttctgttatacatttttcaacttattttgattttttgcagggtatctttttatattaattcttttttttgtttcgtttttagagacagggtcttgctctgttgcccaggctagagtgcagttgcagtggtgtgatcatagctcactgtagccttgaacttctgggctcaggcaatcctcccacctcagcctcctgagtagctggaatgacaggtgtgcaccaccatgcccagctaattaaaaaaatatattttttgtagagacggggttttgctatgttgccaagactggtcttgaactcctagcttcgagtgatactcctgcctcaggctcccaagcactgggattacaggtgtgagccatcgtgctggccttatattaattctcatgtgtggatgcttttgattaagtagagtacctaaatttatagctcttcagggttcacaaattggaggcagtgggtgttgcgatttcagaaagtcctaataatgttattgccattattagtctggctatacatgtgattcttatcaaaaaatttaataattcttccttgcacatcatcaatgacaagctaaactgaccacaaaggcccttatggttttgagcaacataagcaacgtggggtggtgatgcccgtttctgggcacatgggagagaaaagcagcctccctttggctcttccttgcagacaccacaaccaatatataaatgaaaagaagtggctgatgcctctaattccaccacttcgggagctcaggcaagaggactgcttgaggccaaaagtttaagaccagcctgggcaatgtagcaagactctgtctctgcaaaaaataaaaaaaaatatattattttaaagtgtggttgtttacatcgggttcatcattgtataacggatatctgaaagcatcatacagagaggaccctctttttcaggagaagcataacatcagaagtgacattttgaagataattaaaaatttacaaagtcaagacatttcagtaaagaaagactatgagaggaattctcagtacttcgaagagtctaggccccttgaaaaaaaatctaaaatgatcaggcctggtttcttttaagggtgagacgcagtcaggaatgtaacatgctagttttgttaagggttgtcagatcaacagtaattgcagtggcccattttgcttattagagccctctcacctattggcattccgggcatcttgcatcaatcctgcaataaaaccaattaaaattgcattaaaagataaaacctgaaactttgccaataaacgctaaatacactttaaatacactcattttgcctcattcttggaaggtataaaatggaaaagaatggtgtgaatgttgcaaaggcttattgaggacagtaccaatctcaggaggtcagcccggaaaatacaattaagttagtaaactgtgcccagacttgtcaaatttccaggtctggtttccatcagtactgtatttgagggatttcctaagttttatgtgaaactctgtttctacctgtaataaagtaagggagatatttctgagataaatatgtattgaaaaatacataaaatgtcatgataggcaagctgaaatgtcactttcaaaactctatcctttaatccaattcatagcacatatgtttcacaagaaagcgtggaatttgctctgtgaacatcttttacagaaataagaagttacattttaagcatgaaacttaaggacaacttgcatgaacagagctgacccatcaagaattttgaagagttccaactccatggattataaaaatgtcttctagttacactcttcagaagtacataaacataggcttaacttctatccttctataacgtttgtaggactgcaagaggtaagaatcttctaaggaaagccatatttcctttaatcaaaaaagatagcgaattatattcgcagttaaatgagtgcttagcaaagaagtgtgtgtgtcacacgctggcacaggtggatggaggagggtgtatttaaaaataatacttaaaatactgttagcatccaaaaattcaaaataattgtcatcgggtggtgacatttgtggtttgcatttgcttttctgtattgtatacactttttgcattaaatatgtagttgttagtatttagaaaaataattgctctatgaaaacaaataaatgggtattagaaatacaaagagagtagctgactgaatctacttgattggtcccagagaaaagaaaatacccaagtcagatggtcgacacttatttcttacatcaactgcattccctcatttgggcacagctgatggtctaagatggcgccacaacattcttgatgtcctgctacccagctcaatatttgtatgcaaatatttaggaaacatgcacaaaattgagcaagtgggatataccactttaacaataagcattcataatgctatttgtacgactacctgcagagaacaacactggatgatctctttggaaattttataaatggaacactgtcaaatttgtaagcaacattttagacagcaaatatgttgcttggattttagccgtcttaaacactgcaagcggcttaaccttatctcctagtgccactgccttcctggagtaattgatgcttggagtccccaatttcacataaaccaggacactgtgttattgtatacagcaatctgactgctggcagagacaggaaactgcactgaacccagatcaatagacatgtcaacagtaagctgcttaatctaattcagcctatctcatctcagggcacagagtttgcaattttgctgttgggtccctctggcaggaaatggtttggaaagtttagtcttaagaagtttaagtgatatgcttatccttcaggctcttgaatgtttattcagcagaatagctgctttaaatgttttataaatggcagtaatgtaaacaaggcatgtctgacttccctcacatgtgaaaactataatggtgatttccttgactatggacataaagattaacactacagccaattacactttagaggaaactgcttgggtccacatttttagcaaatgccatctttaaactctgtccccatccccatcctcattgaatgacattcttctcagaaaaagaaatgctttgatttatataaatatttgtctctttaactatattagacaaatgacttctgtggttatgaaacctcaaacgcttatccatcagagcatcattcttcttccttggaatagtgtgatagtgtgggtgataggaaatcgtgggttggtatggaagacacagtgtgaaatccagtaactctggcctgccttagacatcaacatctcggtgggaggatgtccacctcactgcttccctgtccctgggtgctctcacttgcttgttcttgcgctgtctctgtctctctccaggaagggagaactagatcgtacacgtcatcacttggaagatagagtgttaaatatctgatactgctcacagctttggtgcaacttgtccttgaattatcaaaaaaggaagggtacatatcattttctacccttgtaaaaacactccctttgtacaagtctcaatacttgtatgtataaggataagcttttggaaaggctaattcattattactgtcatccttaaaatgcccgttacagaggtgtaacaggtggtgcgatcccacttcatggataaggaaatggggggccggtgtgtcaagtgccacaccttggagcagacagcagactacagggatagacgggcatggaaccatgctcgtggcgtgcactgagacaaagcagtgcatgaggagaagctttgtaatcatgaagtacagaggcagtcatgcatgactgtggcctaagggtgagatgcttttggattttgaatcgtgggatatttattcagttcatatttactgaattcctattgcaggtcaggctttgttctaggtactaggaacacaatgttgaacaagacaggcaggattcctccctctgcgactctaaagagggaggtagacaccaaaaggtacataaataagtaatgtagtttcagatattgacggataccttaaaaaatataatgaagtcatgaagagtgacagtgggaactggacacattggggggcaggagctgtcctctgaagacatgacatctgggctcatgtttgtgaccgatgccagaatactacctcccttccacaggcacctcctgcacgcccctacgtccctgaaacatcactcatcactcacaaaggagattcaagacaaggaaggaacaccatgcacacctgactgttggtcttttaaccttcagatgcttgtagtttccaaattatgctctgaatctcaggacttctcaacccattagactctattctggaaaattctatggaaggcacatgacatcttttcattcttagtataggagttggaggagttggcacacaggaccacacttggtgctctgtcattgtttgctgaatgaataaattaataaataggaccagaaaaatctcataatcaacttctgttaactaaccaccatgaaaaaacaagctacagatgatcaccctgaagatgtgagtcaagagagtatctctaagccccatttaaagcagactagcttctaaccactccgtccccacccaaccctccacaaacctactcaattctgagatgtgcccaagtaacagacggactacttagcaaatcactggtaaaactgggaagggcgggaaatactttgccatttggggcacttctccaagagaaaaacaaatttttttttgaagttttcaaatttattttaaagaaggtcgtgacagcaatgaagaagttggaagaggaagaaaaaaagaagaatcagccatgagtggaaagatggattggagaggtcatggaggacaggagatgaggagggcatgggaaatgggggatgggacatggcatgggggaggagggatgtcgtgtggggtgggggatgcaaaaccagaaagaggaagaaaaagggtgaaaacctaactgttctataatcagtggcacctgaaaataatagcccatcaagattcctattttaagatcagatccgcattccaagtccatcaaccaaaaccgaataaatagttcaaatcatcacaggatttcaggatgggccaaaagtagccatagtatttaaaggcctagagcaggaagaagaactcacttcaaatgttcacgctaaaaagtcaaaatcctttaaaggtataggaattattagttcactttttcagctgggcctgcccactttatgtcaaaatcaaaatgaaaaaatctagtaacccattttctggagttctcaataatctcagcctccctcttttttcaagggcaatcatagaaggcggtcttaggaggctgatatcccaactgtggcagaggggcctggcagtaggaaatgttgcagagaatgcctgaaacactgagaaacaaaatactgacaaactccattagcagaaagaaaataactccaggaaaaaaaatggttccatttattatggtacatattttttaattaaagatgaggaagaaaccccacaaaagatgccattagctcttccactttagcgggggtatgcacccccctcttaattatgaaacaaagcacaccttcatgcacctggtgattttctatgcaatggcgtagtagaatgttcaacagggattgttttaatagggctggtaatgagatctgggtgaaaaatctctctgttaatttagcaggcctcctgagatgtaaaatttctagtttgcaggtgtttcgaagttccttgccgagcctaacctcagcctgccccctggttttgatgttaggatttaaatatcacctgtaaatctcttagtcattttgtccccatcaaaaatcacttctagtctcttcttgcctctccactagtgtgagtctattttgatttgcctggtactaactaaaatgctactaaatttggcactgtactaatctataaattttgaaagcaagactctacagagtttaaaccctaagatctttccaatcaaaggctaggcgacctcaaatggccaggatggaatggagcagctgctgtcatttcatgacctttttgttttacgaacgcatcagtccctgtaagcctacttagataaatgacttgcaaattaaaagaaacatttttatgattcactgcagtagcttgctttttgggatacaaggttaaaagtgaacagtaaaccttttaaggttattgaaactgaattattaacgctgggtttcaccttccttttgtcctctttatggcattcttcctaattactcactgcaactccactcctacaagttgtaaatcaaatgaaaaaatctttaaagcacagaaacacctgattaaaatattcaaccacaagggaaccacagagacgatagggagtgacatcccgcgtttttaaaaaatatgaagcttctgatagcttttgaaaaagtatgttgtgaaaattgcactttcatctccggaagtaaccaaaagaacagtcccatgtttgaaatccatttgtaaccttcaaaataatgagcacttttctctacttggatcgcacctggtgcctcacaccccagagtgcattttacctgtgcgattttgtgctcaaacaagagctgtttcaaagagggctggtgactcttggcagagagtgaagttttccttcagccctctgaatagggggtgattgacaaagctctgaaaccacaatacaggcacccgaaatgcaatggaggaatgcctaattctgccttacctacttggggcctccatttcctaagctgtgaaatgggggtgatggcaccttctgcttaggtcctagttgggaagattatgtgcacttctcagcacatagttggttcaataacatattcacagtggggactaatgtgctacatatttcataaaggtatggttctatgattccccaaacagtttgaattagttaaatggattctgactaataaagcctacccaatcccacctcttggtacccacgcattacatctgggatagcagcgggagagctattgaatgtgaggaaagggctaggaatgggagcagggccacctttgggagacggactggccacttcaaatggcctgatttaaggggctcccaaaagcagtgccatccccaatatcttcccttcctgcagggctgggtgaaacatctgctatgagcaggacctcctccgtgggtgtgcaaccctgacaggcacacagaacccaagcatggaggggctctgctgttcccgtcttgccactctcactattttatctttgataagtgaagtctgatgggttaaaggcgcacgtgcatggtgcatgggagaggccatccggtgatgtgcatgtccaccgctttccttgtagccccatttgtatggccacccttgacaccctatgagcgcaagcttcccatggaccagggaagcctgggagttccgcagaggtgctgagagcctcaggaggccactcttttccattcaaaccaggacttgccttttttttttttttttttgataagtaaaaattgtagctatttatggtgtacaatacgatgttttgatatatgtataggtggtggaatggctaaatcaattagcatatgcatgacctcacgtacttatttttttgtggtgagaatacttaaaatctactctcttagcaatcagaacttgctcttaatgcagaaagaaggcaatggcattctataaaacacgaatgaccagggagccctatccgttcctttcttaacaagtgtgttatatctctgttagtcaaccacttacaccaaagatgacatagaaagaaaaagatcaggcaacctgtagtacccttccttttagtccttccttactcatcagtaagccaaaagtcaagggtgtggggacaatgtccatgtgtaaagaaatgagatacaaaccgctgagttagttttgtgttgtgtttcaccattctattgacaatgcaatacacatgcatgtataagctatgaaatacgagttatgtcatttcagtgattctacataccagctaaaggctcttacatttgctttaaaactgacgttcatcacaacagtgtgaatacacttaatgttactgaactgtacccttaaaaatggttaagatggtaaattttattaaaaacctctagcattgcactatataaagatgaaaggtaaaattcatgctaatgatttaaaagtttattttatttttcttagagtaacattcaatagcaaattaaaaacatcatgacaagttgggaaggagaccacagaagaaagaaacatgccttttattttaatacctttaaagggattttttcttgcgctctgaataaggggcccagcattttcattttgcacaagccctcacaaagtatgtattaacagctagcaccgaccagcagccagttatttgagtcagtctttgtccctggagtggcttaaggacaactaaggcctgcccaggaaggattaggactttccccttgccctgcagaaagcggtccctcctactagggactgacagcatgaggccccaaatgggagaccccttcaagatctaggaaccttctatgtacgtacctcgctgctcttgcagtaaatgtgaaaacacaaacagcagcaacagcagaagctttctggcataaccaggatagtaataaatggagagagagagagatccatctggtggtgaagggagagtgtggttctcacctatgtgaaggtaccccaggtctgtgagcgtccccaaggtccagaaagcacttgccagatgctcagaactggatcagcactttacttaatttctaccttcaaagggagctttcctgctctatcagccctgctgaatctgctacctcagtttacagagtcacattgctcctctgtattccaaatcacagcacgataagtccaagaaaggaaaccaaaaacaaaaccgctctcttaagcatttgctagctttgaccacactcaggacactctctgctcccatcctcgcctggcccacccggctctcctctcacctctctgggcagcactcctgcgcctattcagctgccgaaaaccttttcgcaggtgtaccgtgggcccggaattgttcaggccttccctttagtcatctcattgggaactcatagtaaccctctgtgttcggtaagtcccacagttggaagagaagcaggttctgagagatgaagctggacgtgtggggtcggagagcagaggcagagcaggaaacacacggggcctgtagaccacactgtcccatcacctcatggggctcgcagggcaggaggaagccaccaggcagggttggaggacaggatgttacacaagacaactggcccagattccgccaaaatgccaccaacaagagggacataaaaaggggaagggtgggagaatgaacgttccaggtgagaagaaactgaaaaagacatgatggccaaaagcaatgcatacatttaacaggatcccagatcgaaaacaaactatcccaattaagggaacttgaaaacaggttatatattagatactattgaatcagtgtgtttctttattgttgggagagtttctaaaaataaccaagggacacagacccatctcaggagactgcttagctctttacgtgggggaaggcgaacagggtgagagataaatttgaccatatccataatgtgtggtttacttaacaagaactctaaaggataaaaaacaatcaagagataccatatgagctacagactgctacagagaaattgtatgggcttagcataatcaagttcatgtcagcacagaaatagctgaaaacagtaataatgacagccatctattaataacttcttatgcacaaggtaggtccacccagcctctatatatttcctcattaacctttgtaacatctctgtgagacaggtgtgaacactgcttgtattgaatgggaaactggggctcagagaccatgtcacacactcaaggacacacagccagcaggtggcagcccctggattctaacccaggtcttcatggctctaatcccagcctaatcacttttctaaatgacatgttttaaactacatcagaggcgagacaatagaggtggatattttaaaagcttgttcttaaaccttgagggtgtacttgatccttacagtttgatatggttcaaactcctaagcaggtcagcctcaggagggagaagtcgtctcattctgacagcctgagccagatcctataatcatcaacgcccttatattcctgtctcaaaacaacaaactttaagagattgacctaaaagcttttcataagacacagttaagacgatcaatatctgaatacattgctcaatgaatcctgcttaagttgacaatatggaaagataacttctcagctggactggcaaaaatctcacaagattttgcagaggtacatgggggaattagagcaatatttcttcttctttcatcagtgttttaagcatactgaaactccccctcaggggaagagaccaggtgtcactcgagtgtgcatgtgtcttccacaggcacagggcacagagctttacacactctaaatcctcagtaaatatctgcggagaaaggagactagattctcacctgaatatgcagagatataaacaaactccagtgcagcaaatttaagataactctctaaagcactggttgttgtcacacctgtgaagtaggaaaacttaggtgccataacaggaagtgcacagggcgggcagagggacaagtgcccatctctgcaatcaatagggggccatgaaaccctcggccaaacaaagcgcagaatgactgggagtaaatagcagaggtggaactggtcgcgtgtctgctgtcatctgagggtttccaggttttcttagacatgctatttcattaggcctggagcacttatccatcatcctgttcaagttccatcaaatcagtgtccctttttatatgtctatctcaaaaagctacaaagcagtctactgagtactgtcagctagaatgatttattccttttcctgaacaagctggttccctggctctattttcattgttgttgttgtttcaaatgcttgactgttttaaattttgaaagagagacagaaaaaaaagagaccaagattttcaaggtttagagatgttaatatttaatcaaatttaaccaaaaatattttaggtcctactatgtttcagccattgaaaacaccaagatgaataagctcatattccagtagggaacacagacatatacacatcatgacaatactggatttcatattcaacaacagacaaatgtacacagagataagtaggaggaagctgtatcagagtggagaagagaggacacggaaagtaccacagagagcttaaatatccaagatgggttccagaggacaaatgaaagttcaccaggcagactggactagttttttttctctttttttttttttaggacagagtttcactcttgttgcccaggctggagtgcagtggcatgatctcggctcactgcaacctccacctcccgggttcaagtgattcccttgcctcagcctcccaagtagctaggactacaggcacacgccaccacacccagctaatttttgtatttctagttgagacaaggtttcaccatgttggccaggctggtcttgaactcctgacctcaggtgatcaacccaccttggcctcctaaagtgctgggattacaggtgtgagtcaccatgcccggccagactggtctgttttaattatcggttaaaacatacacatgcgagcaagataacttgagtttcttacctcatctcatatacaaaaattatctcaaaatggaccataggcatgtacataagagctaaaactgtaaaacttctggaagaaaacataagagaaaaatcctcatggttctgggatagggaaagagttcttagatatgacatcaaaagcatgatgaaggaaaataaagttgaaaaattggattcatcgaaattaaaaacttttatacttcaaaagacaacagtaagtaaattaagaaacaagctacattgttgtaaccttgggcattaaaaaaataaaaaatacataaacaagtcccagactgggagaaacactggtaaaccatatatctattacaaagactagtacccagatctataaatgacttacaattcagtaagaagataagcaatcttataaaaacggaggcaaaagatatgaatagtttaccaaaaaagaaagaaaataggctattaatcaaacaaaaagatgttcaacatcattagaaaaatgcaaattaaaatcataaaataccacttcacactcactaggatggctataataaaaaggatacacaataggctgggtgttgtggctaatgcctgtaatcccaacgctttgggaggctgaggcgggtggatcacttaaggtcaggagtttgagaccagcctgaccaacatggtgaaaccccgtctctactgaaaatacaaaaagtagctgggtgtgttggcacatgccggtaatcccagctatttgggaggctgaggcaagagaactgcttgaatccagggggcagaggttgctgtgagccaagatcgcaccactgcactccagcctgggggaaagagcgaaactttgtctcaaaaaaaactagacagacaataagtagtactggtggagatgtgactatattagaactctcaaacattgctggtgggaatgtaaaatgattcagccactttgaaaaccagtgtggcaatttattaaaaagttaaacataaacttagcaaataactctgcaatctcacccctgggaaataaaacgtgtccacagaaaaacttgtatgcacaagttcataacagcatgattcatcatagccccaaactgaaaagcccaaatattcatctactgttgaatgaattaaaaaaagtagtatatcttataatgggatactatgaagcaaaataaaggaaggaactattgatatatacaacagcatgaatgctaagttaaatgaacagatgaatgctaagttaaagaatccacatgcatggcaaagatttcacgaagaagactcaaaagcaattggaacacaaacaaaaattgataaatgggacctaattaaacagcttccgcgcaacaaaagaaactatcaacagagtaaacacacaacctacagaatgggaaaaaatacttgcaaactatgcatctgacaaaggtctaatatctggaatctataagaaacttaaatcaacatgcaaaaacaaacagctccattaagaaatgggcaaaggacatgaacagacacttcccaaaagaaaacatacatgtggccaacaagtatatgaaaaaatgctcaatcaacatcactaatcattagagaaatataaatcaaaaccagaatgatctccacaccagtcagaatgactattattaaaaagtcaaggctgggcgctgtggctcacgcctgtaatcccagcactttgggaggccgaggtaggtggatcacctgaggtcaggagttcgacaccagcctgatcaacatggggaaaccccatctctactaaaaatacaaaaaaataagctggacatggtggtacatgcctgtaatcccagctactcaggaggctgaggcaagagaagcgcttgaacccgggaggcagaggttgcagtgagccgagattgcgccattgcacgccagcctgggcaacaagagcgaaactctgtctctaaataaataaatacatacataataaaaaaataacagatgttggtgaggttgtggagaaaagggaatgcttacaaactgctggaaggaatgtaaattatttcagccactggtggaaagcagtttggagatttctcaaagaacttagagctaccattcaactcagcaatcccattactgggaatatatatatatattcccagtaatgggaattattttttatatatatatatatatatatatatatactgggaatatatatgtatatataaaatttatatacccaaaggaatataaatcattctaccataaagacacatgcacgcctatgtttatcatagcactatttacaatagcaaagataatggaaccagcctagttgcccaccaatggtggactgaataaagaaaatgtggcacatatacaccatgcaatactaggcagccataaaaaggaatgagatcctgtcctttacagcaacacagatggagctgccattatcctaaggaaatgaatgtgggaacagaaaatcaaatactgtacgttctcaattataagtgggagctaaacattgagtacacatggacacaaagagggaacaatagacaccggggcttactggagggaggagggtaaggactgaaaaaccacgtaaccactactatgctcactacccggatgccaaagtaatgtgtacaccaagcccccatgacatgcaatttgcccatgtaacaaacttccacgtgtacccccgaaccaaaacataaaagctggaagaaaaataaaaaagaatctacatgcaaaaaattatacatattaacggttccatttatatgaaatgtctagaagaagcaaatccacagaagcagataagctggggtgagaacactgctgggatttttgtggatagaaatgttaaaagactagattgtggtgacagttgcacaactctatgaatttactaaaaattatagacttgtacactttaaacgggtgaattatatgatatgaacattatacttcaataaagctggtataaagtattggttaggatgaaaatggcagaggaagatatgggattttaagcagcacaggagctgaatcgtgttcaacaaaattacttaaatgaaaaaacagaccctgtgctcccaaatgcaagctgagacatcccctccaccatgtgaaactctcttcatctgtccctttattacgcacgtgtgtttctgaggcaggtaactctgggattatattgaagcttctctcttttttgctttttattcctgtagtcaccacacctcgtctgagatcacacttctttcctctttatatccaagttactccatggccctgatctctgtttctcctgagtagagggctgatgaggacatcataacagtgtttccttatcatttccttcagcctccaaacctccagcaactgggtcccctgtccctttgactcagtcctcacaacagccacacgcctagccaatgggatcaccaagcccagcttctcagcatcagctatatgactgcttctgcatgagatgcctctcctccaaatacagcttaaaaaattttcctcctccttattttatttagagacagaaccttgctctgtcacccaggctggagtacagtggcatgatcacagctcactgcagccttgaactcctgggctcaagcaattctcccaccttggcctcctgagtaagctgggactacaggtgtgtaccactatgcgcagctaattttagaattttagaatttttattgtagtgtagaattttattctagtgatagggtcttgctatgtgacccaggctggtctctgaacttctgacattgagtgattctcctaccctgacctcccaaagcgctaggattacaggtgtgagccacatctggccccaactcttctttttaaatacattccacaactgttatgcctaaatatgcctctttaatactatcattttgctcttgttcatacgtcccatcataattcttctctagttgagggtgcgtgtgtgtgtgtgtgtgtgtgtgtgttcaacctgctcaaaaactccaggtcacaaactctgttctgcctcatatttcttatgttttcagtacacctaatcaatttttgttgtttttgttactgggcaatgaatgaacaagcaaacaaataaccaaaggagagaatgagtgaagtgctgatgcaacaaagaaacatgtctttcattttattcatccaatttgtgcattttagtaccttttcttacataaaagtcttaagtgagaactattcatctagcttttgtcatgtggctctcaaacgaattcctatttgcatttggacagtttaaaaatactgaagcgttagttcacatttatacacttgggcagcaatgaggtgcgacagaaaaggcaaatacattagtgtcaaatatgaataacctttccttgcccagctctggggaggccctgagctgaggaaacaatgtggccttctgtttctatttaatacattgagcaaccacaaatcaaagactgtaaccaataaataaatacataccatagaacataaacctacccagccacagaaatcaggaaagcctcaacatgtggatttcctgagcagggagaaacacaccagggcctggtccacccagcagcagcaggtactacctggaagaactttgtgcctcttccatcatccccttctacctctactccagacctctgcatgaaggcagattccgttctaaactcacactggtaaagttaagtattttgtctatatttgccaaaaagcaatgtacaaagacatctcaatacggccaatatctagagaagaaatagactgaaagttttccatacctagcgactcccactagtcacctgactataggtctggactggctctacctcctccaaattatttttcctttagtcaactgaatactgaggatgtcttgtcatattttggccttttccttctcaatgcaaaccaaccaccaggaaagctagaaactctttttctctctattctaaaataacaagtttggagagcagagaggaaattgtacaactggcaacttaaaaaaacaaactaggggctgggattggtgtggtggctcacgcccataatcccagtgctttgggaggctagggcgggaggatcacttgaggccaggagtttgagagcagcctgggcaacacaatgagacctcatctttatcaaaaaatttaaacatagctgggcattggggtgaggatacagtcccagctacttggaagactgaggtgggaagatctcttgagttcaggagttcaaggctgcagtgagctataatcgcaccactagcattccagcctgggtgacagagcgagaccctgtatcttaaaaaagaaaaccccaactgaaactcaggttactccagttgtatccaaaagcggaggttcatcctagccacaaaaatttctcagtttgtcatatttgttttagacatccacatatatatacatgttcaacaaaatttattaaaatagctttatatactctattcttacaggaaaaaatatatacatgagatattttttccttttgacatacactagtgttattaatataatcttaggcaaaaaaaaaaaaaaaaaaaaaagaacttgttcattaactacaaagaatcaacttttggttcctgaactatattacttccagaagtcacactactggaaatatattagttacctctgaaggtcacaaaatttcaatcaattttagaatgtcagggctgtctatggcatattccaaacctcgacattcaaagtggcagctgtggcttacagatgatcatctttcaggtccatctctaactgacgcaatttccacagggcagagatgtgcagaaaacttgtatgaggcaaatgtcttctcttgaatgtctctaccactccccctaaacagccactcattgttctctgacatggacagatttgctttaaatcttcatcttttttttttctctcttgaagctctcttgcttgttaacgccctgaccttcgcatctgtgctcagatgacagctaatgtcatctgctccaacaatgccgactattggcaaggaacataagcacgctcagtgatgtcactgaactcattagggatatatttgacattctggcccaagagaacatacttattaaacacaaccttagtgatcagcagtgtggcctgttgatagtaaagtaaaacaatacatgttttgtcctcctataaaaatagcactttgaccaagaaataggctttctgttcttatctccttaattatagcagcaaagcaaactaagagataacttacataccaagagataataggccgaaacactcagcgctatgttaggcgcttcacagaactcgaataaaggtccaaatattaatcaatcattaagcaaatacttcactttcccaatcctggtttgagagcagagtcagaggttaatgctgctgagataatattaccagataccacgtcttataggtattcaatagcaatatctaaattatactattagtccagatatgagatatttgggggactgataaaactcacaaaatgtttcttccaaggactccagtcaattgcaattttatgaccctatctatttggtaaagatgactggacctggatatgacagacagaaaggggagcttgaaaaggtcacagtaacatctctgctctgcagcgtcacagcacacacctaaacagtttaggaaacctggtaaaacacggccatgtgggcttctctttagacctcacgagaggcaaacctttaatcaggacttaaaatcccaacaacttatcttctgagatttttcaaacaagatgacttttatacacgtgaatgaaatgttcctcttttatagaacagtatgttggaagaaagttcaacacgaaaatcataaaggaatattgtgcaatacaaacaagaacttggtccccaaattacaatatagagaaagtaactgggaagggtaggtaggattgttgcctcctggcaggtatagtcaaatgttttccttttttcttttagagacaaagtcttgctgtattgcccaagcgggagtgcaatggtgtgatcatagctcactgtaactttgaactgctaggctcatgcaattctcccatctcagccccacaagtagctaggactacaggcacatgccatcacgtgtggctaattttttaattttttgtagtgacgagatctcgctatgttgccaaggctggtctcaaactcctgggcctccagcaatcctccagtctcagcctcccaaagctctgggattacaggcctgagccaccgtgcccggcccatcctcaaatgttaattttttttttttttttttttttgcctagctccaagtaggccctgaactgaggaaacaatttggcctttacattcccttggactctctgtgtcagaatggagtgcccttgcctcccgtaaactcttcagcctactaccccatcaggcgtgtagccagatatcctcatgtagctaaatccatggacatcattctgttacatcttaagcatctcttaggtccgctagaaacagtggactgctgcctccttcctgtcttggtttctataggactgcattctcttgatttctattattcctgctaccccatctcagtttcctttgctccttgtcgcttctgtactgatctctcaacacaggagattcccaagggctcagaactagcccttctctctcttccattctctccctcgatgatatcgtccatttccatggttttaaataccatctgcatgttgatttccacatccataactccagtctacatgtcttctctgtccaccatattcacatatctaaccatttgcttgacatctcaaactcagcatgttctaaactcaacacttacaatgctctaagcctgtttctcttgctttctgcatctcaaaaagcagtgccccagatatttagttgttcaagtcagaatcttgccagtcattttttatttcctacccaataagcatcaggtcctataggctctaggtttaaaatcgctctctcgtctatttatttctatcccatcccacctcctagtgcaagcctccatgattctgtcccaggagcagcagcagctccctcacacaggcttccctgcctcaaggctgcccactgtgctggatattcacctactgtctgtctctgagctccaaggtggccctttacactctgcactgtgatgtgggagctgccttctgcagttattatctccagttaccctgtgttgcctttttcttctacttccaacacctgtgtaaccaagcccctatactaaatctcatctgtttgaagtacctagtgcaatttctgatataactactgatatagaactactttgtaatcaatttctgatacaactactgataaaactactttggctgatgtaactactttgtaatcaatttctgatataactactgatacgtaactactttgtaatcaatttctgatataactactgatacataactactttgtaatcaatttgtgatataactactgatataactactttggctgatacaactactttgtaatcagtttccctcataaaaagccattgggatgtttcaaaattatgaatcagactatgctcacaatctaaagaacactatatggctccctatgacatccggaataaaatttcatattttagctttgcctcggtaggttcatctgccacatacctctctgatttcttcccataccactcaacacactgtagccacactgactaccttctagtttctggcccatgctaaacatctcccagccttttgctttgtccacatagctcccttctgcctgggtggctctttcctcccttctctgcatgaatgacttctttgcatccttcagtactcagccaaatgtcatcttcccaaagaaattattcagcaccttgattatgctcttatcataatgtattacaaaatatttattcatttattttattttttagttaactcccatcccccatgctagaaaaggcaaggactttattgaactcaccactatgtacccagcacagtgacctccaatatatatttgctcaatgaatgaatgaatgagtaaatggatatcattcttatgtttttgtaaatgaatgactttcaaataccacaaataattggtaaaaacagaaatagctctctttcttataaaaatgattttgcaaggcaaattgataacatacatgcactttatggagaaaataacttaaaaatactagtccatggcggattctttagaaattgctttatttaccaagttttgtgctatttgtaaattttccttatctatttgccaaagcaatttctccaaggaactccatgaatctgacagtaattaagttactattaattttttaaaaatattctacaattcagattactaatttagttaggtctttctcctgcttaatgtgaatttattaagttttgccatattttcttcattcattttttaaaggtaaaattattatgttatagaactataaaagcttcttaaattactaggttgaaattcccaacaaatcttcctggaactataaaagctaatgtcagggctgaagcatcggagagatttgcagtcagcccaattctgctgctaaacatgacaatgacttgggtgagaatcagctcataggttggtaagattctaggcatgcttccagagtcgaccacattgactttttgtataacctcattcaaattgtttgcccttgtcgtgttctctcctactcatagatatttttgtgatggatatggcattatttgcaattggtggctatttgtggataatttgctttttttccccaattcatctatgtgtttataaaacgccacattaactaccactgacgtttagttactgagttctaatgactgacataaacaaacaaatgtgtgtgtgtgaatgtgactggcatgaaattggatcttgccgagttctgactaatgatatccacttgtggtcttactggtctgaatgtgagtcaggtatgcatatgtatgaagaaggaaggttgcaataattgctctggcttttgcatgtcttttatattttacattgtactaaacgattttgatttgttctcagaaaatgtctgacaatatccagttcaatgcattttccagctgaaatgtttccaaacatggtatttctctctaaaaatatccaaccatataagtatattcaaacacttttaaaagtatttgaattaacagagataccgagaaaactctgcacaactaaaagggtgtcactaggacaatgtcatcttctctatagctggtgaatgccaaatgttggaatcagagtttaaaaagaccttggagattatacctaatccaaccatctattgaagtacaaggctagttttggggtatgtgacggctataatatgggtaacctacagcttatgatctaaggaaatggggagagagagcacttactggagagatgatgactaaatttcacaatctacacagcctactgtctgtccagtgatatccataaaagaaaactgcatctgtagtaatagacaccatttactgggctaaacacagatattgaagcttatttttttatttcccactcttattccatttatttcagtttccagggctgcctgaccgggactactttaataccacctttactaaagttttccacaactataataaagaacacgtaacacatttgtgtcaatacaggactaaagataacaacattttccgataatgagtatatgacaaataactaaaagctttaattataaaaatattcttttccttttagcaaggtagaaaccttttgttgcgctactgttgtttttcctgtttggtattatggaaaaattgtcttgcaaccctgaccgccttgcaacaactagtttacaggaaggaacagacctagacccatgctagtactcaagacggaaaacgttaacagatgtccaaatctcttaaaccaatgtgaaattttcaaaagttttagtgggattcaataagaaataatgtggggctaaagaccttcacaattctcttagcaccaatcaagtctattctccaataagtctggatgactgcaactcttttcatcaagggagtgcagggggagagtgagaattagggttcttaaaaggatggggaaactaagaataatttagctcttggaaaatattattcccaatatttatcaaagttgacgttaaaataccataaaattagatcctctacaaaaagagtgtttaaatttatccgaataacagagaagctgtaacggacagatgctgaggtcaagacaactagccttttacagctaatacaaaacctattacagccctcgatacacattgctgggttgtgagaatgagcatgtgtctgtaaactcttaaccacagatgagaggcttgcttcctgagggtttttagtttcttttaaacagatggtccaaagtgaggatgaaggaagctgttttgatccattgtgtaggtacagaatgttatctttgttttgtttaagcactacactgcctagagttaaataactgggtgaaaattctcagctttaactttgaagctagagcacatggagacaaagtgtttgataattttcttcagtgtatttgcataaatgtttactctcctgcaaatatgaatataaacacaactattcttatttatttagttaagggttaggtgtacttctatacgcactgtatatatattttttaacaaccatgatagttttttgtagaaataggagaaatgctgctgtttaacaagtttaattaaggatgggggaaatactcatatgtaaatttccatacaatatctcaaacagctttcaaaaggcaggaagtaaatcttcctgacacatcttttgattacataaactatgaacatatacaagtgaatataactctgaaattttgatttactcagggacatttgattaggacattattctgatatatattataaccccacattacattgttaaaataataaagctcaaagtagtacttctccatgtacgtaggattgggaattaagcatgttgtctttttaaacttagcatttggatgcagtattttatatgcgtctcctggcttggcttcacactggtaaatggtgtttcatcaggccaaatgatgggaagggtggtccatgaatttagtttatgaatactgacatatttcaacccacaaataggaatataacattgcatcaaaatggagcaaaaagagaaaaaagcagcagccaataggaaaatctagatgaactaaacaaaggcacttaatttaataatgaaaaccactccaacttacaatgtactgtactccacctctagccattgaattattaaaataaatgcatattcagatgtttcccaaagatgctttccttctctttcagattcaaaagaacgccactctaatccaatacaattcttttcactctgcatttcagcagctgtctttcctgatttctaatcaaagctgatgataactggctttggcaacagactgtagtatcccaaatgagtaattaaggctataaatgtgctcacttcttcctcaaaacccagggtgcatttcatagcctaacagattcaggctcaacaaggctctcctggttgttttaatttggtcagaatttttaatacattaataaaagaatagctgaggttttgtgttagcatttttcaatagctagttccacttaaacaatacaaatgtcagtagggctaacaaactcccttagtcccaaacatctcccacacataggggtcccagacaaagaagctggtagccaacaatcggttttgactaagaaagagaaatacatgcccttaaaaaaaaagcctaagaaaatattttgaaaatcacaggaaatgctttttaaaaaaccatgcagtgctgaacactttaaaatctcagagaaacagtggtgacgggaatagacactcacttggaagatgactctaacctgaaggaatacgtctctcttctaactcactccacctcctataagaaagattctgagtaactcataaaatggaggaaaatcctaataaatccactgtgtcaacctgattaaaaataagcagcattttttccagctcttaataactgcactgtacagccatgaatatacatggttttaaatatacataacttcagaatagaaatttaacactgacatattttattttaaacttttttttcttcctcatgccaccagtttaagagcactgacatattttaaaaggagaatagaccttcattacaaatacagatgggtattttaagaaaataatctaaaataagagaaacagttcaccatttcggaatttgtttgcttacatgcttgacatgatttgttttaagttaaatcgaacattttatttaaggtcatgtgaattcttaaagagaactggtgaattactaagctctgataggccatttctttaatctaacaccatcctgaggctggcagcccactgagtgctgagaggataagcaaaaagagaatgtggagaacagctctaggcacggtggccgatggaagggtgctcactggcttctttctgaaacagcctggtggacatcagtaccaaaagcggagcctccgccttgagcagagggctcaggggaagaagtgtcaaggcagaggcagacacagactgagagaagtgggctgaagtctactttcagatggaatcctggttcccctaagatctttctgctaaaaccaaagtttttaaaaattggtgtttgtgggcctggtatggtggctcatgcctgtaatctcagcactttgggaggccgaggcgggtggatcacttgaggtcaggagtttgagaccagcctgaccaacctggtaaaacttcatctctgctaaaaatacaaaaaagtagccgggcatggtgacgtgtgcctgtgatcccagctactcaggagactgcgacaagagaatcacttgaacctaggaggtggagtttgcagtgagccaataacgcgccattgcattctagcctgggcaatggagtgacactccatctcaaaaaaaaaaaaaaaattggtgtttgccttaagtagaaataccctaccatcttttgataatattatctgaaaatgaaaaaatatgagtatttttagagtttaaaaatattttattggcaggaaataggatagatcatggacatctgtcatagttcattttaagttgttacaagatagtaggaaattggataaacagaagcagcagctaacaatcactgagcaatcctatgtgacaggaacattctcagtgatttagcgtatgacccccgtctaattcctttaggttgtttaaggcacaattatgattcccttttacagaccaagaaaccgaggcttagaggttaagcaacttgatcgagataaatccataaaatgaaagatcatgcagccacttaaaaaatgttctcgtaagagaatacagcgtggtctggaaagatgttcgtgacttattaggtaagagggcacattactaaagagttatgtagagtatgattttattttcagttctgagtaagtacagatgtgcaaataactgtatgtgtctaagcatatactctaaaatattaaaaattattgttttgggggctggatgatcttttccctttcctatgttttgtaagttttatacaaaaaagtatcactttcatattcagataattttaagctttagtcaaagggatcattctatttttgtattcaatgataacaattttcaggagttttagtttttcagaaggcatgtgaaattctgaatagcaaaatctttgacagacaggcttttaattatagctgccttgaggtaaggtgggatttttggatttggtgaaaagaagttgctttaaaaataagaaacaggaagcaccataaagagagggcttgttttgcttcctggtggagatgtcttcttggtggcacacccaggagtcagcctccttttccccaacctcccccttcctgtctccagagcaagattttctgaggagaggtaaacagtccctcccaccaagcagagctcaaaactatagagagaaggacctcgagcagacaacacagacagaaactgcctgagcgtgcaccaccaaacaaagagacgctcaggggtgaggagcccacaccctgcacacacacatccatgaaaccagtgtcaactgagcagccaccgtctgccagccgctgtttcggggcttgcagacacacagctttacaggacagatggggtctctgctctcctagagttacacttaagagggcagaatcagaaatagaaaaacacagggatgaacagggcaatgtgagatatggatctatgtataaaaagcattcaagagggaccatgcgcttgagaggacgtgtctgtggtggggcttggcttgtgctttagacaggacatcaggtagaccatgctaaagaggaaactctgagctgagcctggataacaggaagatgccagtcatttcaagatccagagcaggacacccagcagatgaaatggcaagggcaggggcactagcagcctaggactctacatttggcctagtcaaggagtgcaaggaggccagcgtggctggacagtgaacactggggagcaccggtggaggggagggtggtgggagacccggtggtcctggcgggcctcagcagcgggagggcacagggtgtctagtgttcacagaagtgaaaaagcaaagacaggtccataaaaagagaaaaaaggaaaaacacagaacagaggaatggaaagcagcactgtagtaggcaaaagaagaaggaaacagactgagctctcaatacagagcagggcaacacgtcttaatcacagctgcaatgaagggccatcaagatgtttcacaagaacctgaaacgaactgcacagtggccacagatgcactccagggtactaccaccacttgagcctgtgggagtaatagggaggacatggaattcaggagggagcgaggtctcaacaccaacgccagaagaaatggacccagaagtcccagaccacagcattcttaccaggttctaaataggcgtcatcagtacttcaacactcaaatcacatttgtctggcttactcacaaacagctgtatctgtttaactctcaagtcaacatggttataactatctgtattgtgcatattgagtctcttttaaaaaaaaaatctcttctcattttaagtccaagtaagacccttaactaggtatcatttaaacagaaatacctaaatccaggtatacttatgataaccagctggcatggtcaagtatactctactttccaaagttgctatcatatacatcttcgcatttgaattcactcctggagctcatgggagaggtcagtatacaggggtcattataatcatagcggaacataacacactggtacagctttatgtttttatgcatgctttcatatatataatttacttgatcagtctgtcttccttttttaattggtatgatcatgcctgtttataaatttattaaaaggctactgataatcaggtgaccttgtccaaggcagcactcctatttaaggacagtggcccctctagcctgcaggtgtccaaatccatatcacatgtgagaggacatccgtaaaaggaaagacgatggtaggaggcgactaccttcatctgcacccctcatccccagcaccacacccccagaccagttcaactcccgtaaaatgaggggttgttaaaccatgctccttccagctctaaaatggcagaaatatatgattctaaaggtttgcttttcaacataaagtttaatgaaaaccaatatttcacgaacaaaagtatgaactacctctccatgagaaatgaccactgtaaagaccttgtaaaaagtatgcacactaaaaataatttaaacactttgaaaggtggaggcaggcagatcatttgaggtcaggagttcgagaccagcctgaccaacatggtgaaactctgcctctactaaaaatacaaaaaattagctgggcgtggtggcgcacacctgtaatcccagctactcgggaggctgaggaaggagaatcacttgaatctgggaggcggaggttgtagtgagctgagatcacactattgcactccaacctgggcaacagaccaagacttcatctcaaaaaatgataataaccataatttatggaaccaattctccatttgtagccacagtttaagaaacagaaaatccatttgcatttctatcttgttagtatctgtgttgcgctggtgttaactaataacatacaatatttaaaatttgtgttacacacagaaccaattataattacctagtgagaaaacaattttatattgggaatctaaaaataatctattttaccactataacagatcacacacattatgaaatactactgccaattaatgttacggtggttcacgtactgacagttcaaatttgaaatgctctcatcccacctgatgcccacattcaaaacaaaggacctggaaaacactagatagatgcaaatcatccttatgcatatgtaacatatattaagtacattgcccaatacatcacattcagagattatttcattttgtttactccatagatggcccgcagtttttacagattaaattccatttaaaataaactccgagatgttgtccaatattttatgatgtgctaaaacgaaatgcttcttcaagtaactgagctactcattgaagtctgaagatctacttactttaaggattttttaaaaatcataatatggccaggcacggttgctcatgcctgtaatcccagcactttgggaggccaaggtggatggatcacgaggtcaggagttccagaccagcctggctaacatggtgaagccccgtctctacaaaaaatacaaaaattggctgggtgtgtcggcgcgcactgagcaggagaattgcttgaacccaggaggcggaggttacagtaagccaagattgtgccactgcaccccagcctgggtgacagggcgagactccatctcaaatatatatatatatgtatatagtcatcaaatttgacctgcgccataattaaatatatgtataatactgcaagcagtcactatgacaaatgttttagctaggttagatcattcatcctgcacaacaaccctacaagatagtgactataattatttatttgtatacagttatctagttttacagataagaagagaaaggtgttaagcttcccaaattctcagtgcttaagtttgagaaaagaaaaattccttgtcagtattagttttcctatgtggctgatcagttaaagaataccaataaattgataaatgtggtaataagcttaatatctgtttctattgcacctcaacttcaatattgcagtacagtaacaggatgttactttagacaatgtcgaattaccagtagtttcgcttagaatttgaaactaattgaagtaagattttgtttactataaacagacatctcaaaagaggctgattaagggataatatatttcttactcaggaaacatttaaaggaaatcagcaaaatgttgcgcctagttaaacatagtgcccagtcttgcctgaataacggcccaggaagaaaacacagacgaacagagatactgaagggcctcaaaataacctacatactttgtttccttttgatacctgttcttgaatccagcagtatcaggaggatattatatcatgaccactggcttaagaaattcaccaagaaaaaaatgcaacgttatcaattctgaattatggttatttttgaggaaagaagtcctagcaaaaaattacagtgtaataatagatttgtaaagtgatatattctgtcccatgtcattgatatgttactaaaaatcttatacaatctaattttaaaaattgaatcattcttacatgctgagttcacatgctatataaaggaatcttcttaaataaatgaatcgagttattaagtatcttgaagtcatcatttttcattcattcatcttacatactgcctttaaattctccaaaaatgtacacatgaatttggaggggataagggtgaattaaggcatggtccttatccttatctccttaagataagttcttatttccttacaggagagcttgccttgtacacagtgaccccacagccctatgtatgagactgttttctagcagcagtgtgagtcctaaaaacagatctcaggaagtgccttaatgacttcccaacatcaccaaagaagatgtcgggagaacacagggaaaagtacaaactgcaaaaagtggagcggatacagatagcttttaacaatcctgtttagacacccaaggaagtcttagcagacatacaaactctgtcagatctgaggataggaagagattcattccaactaaaagtactaaatttgcagaaaagatggcattggagaatcaggagagggctgcagcagggcgttccacactgatgagaaggcatacgtaacgggggtaggaaaatgcttgacgcaatatgggatgggaaagagccctaggtgactagtttcaatgaggataaatactggggattgagtcagcagtgcttccctagaatgagaatgccacgccaagtaagttggacttgattctgccgtcgttctttggagagggtgagtgaggccaccctgactagaatttagaaaggtaacagacaggactaagagggatcaagggggctgagacaggtgtggacacgtaaatgctgtgacttcattatgccagacaaggggtaatacatccctgaaacaaaacaaaacaaaacaaaacaaaacaaaacaaaacaaggaatgtgtggagaagaactgatctgagaaaaagtatagaaatagaatcaataacactccggaactaggtatgagggctaaggacggagaagcaagaagagcacaggagatggacagggtgctggtgaaaagagcagagagatggtacacagtggcagccacggtctggataataaagaccccaccagatctgtccccgttgagttcgtgatgctgtcaggatgcccagagacatgtgtgcagagccaggcttggtgtgtgccacagagcggcactactacagtgtcaatggaaatcataccagtgacagctgaagacgtgacagggagaaacatagacaagggtgtaggcacgtgagaatcacaacagggacaaatgaactccccaaaaggtggggatcagcagtgaagacacaggagagcactagtgaccaaggaagaagggtgtcctataagtcaaatgtggacacattttcctgatggcctccagatttggcaattttgtcacctgaaaagaattttcttcagtagagaggggctgaagcccattttaaggggtttaagagtaagaatgaggtaaagagatggtagaagcctttggcagaacagttgttcaaatatattttaagagatttccacttccagcaataagaagatacagtagtccagaattaacttcctactataagcaactagaaaactagtcaaaaataggaaacaactattttcagcaggaactggggaccaagatggctaagactgtaacccctgagaaaaggaaaaaaagaaggggtgccccaccatcaccttggctttctgggcactgcagtgcagggagcaaaaccaaaccacactgcagccaccctgagttgaggggacagaattatgaatctgggaggctaaggtggtcagcatctttagacagatgacctgagaggagagaactacacagagaaagagctccagaaatcagcacgggccctcttcagtctttgattcccaccctgggcatgagtaagggaaaatcctataagcccagacaagaacaacttttgtgaaaagaataaataccaggcggccgtaagatgaacaactgtgggcaccctgatagtacccacgcagaggaggagactgcatggactgaatacccagggtattcagtcaaggagggctacgccttggaaatggggctaaattaggccttagaatgaaagttactctgcaactggtctaaaagcgattaaaaggtaatttaaatataaaagattagcatgtaacttaactgcctgccaggaaagatccaacacacacaaaatacaatgaagccaggtgtggtggtgcatgcctgtagtcccagctactcaggaggctgaggtgggaggactgctggagcccaagagtgtgaggctgcagtgagccaccacactccaacttgggtatcagagcaagagcctccttccaaaggaaaaaaaaaaatgaaacccaagccctcagtaatacaaaatgtataatgtctgacatctgataaaaaattattagacatagaaaggaagagggaaatgtggccacaatcaggagaaaaatcaatcaatagaaacagacaggatagacatggtggttcacacctgtaatcccagcactgtgggaggccaaggtgggtggatcacctgaggtcaggagttcgagaccagcctggccaacatggtgaaacctcatctctactaaaaatacaaaaattagccgggcatggtggcagacacctgtaatgccagctatttaggagactgaggcaggagaattgcttgaacctgggaggcggaggttgcaatgagccaagatcacgccactgcactccagcctgcgtgacacagcgactctgaaagaaacaaaacaaacaaaacaaaaaacacaaaaacagacccagaaaggacagtgatgatagaatcagaggaaaaagaatttttaaaaagatgcttcaaatacatgctaaagaacataaagaaaaacaggaacataaagaggagagaaatgaaagatacaaatattttgatggtaacaaggaggcttgggatggaatgaatacttaattcactgattagattgaaagacaactaatactggttacattgtttcattgctagacacagaaattggtggtattctgactcagaatggtgtatacattggaccttttgttaataatcggaaaagtacggtcatcttcctttaaaccttaactgtttaagaaaaatgttacaattaagtactactatactcccattttttacgttcaagtattacaacatcattcaaaataatgtgacctgtgctttgtactgataagtaactgatttacgggagtcctacacatttttaggcatccccaaccacactaggtacattcctttctagatcatttcacataccagttgcctacagttctttaatgcaacaaatttccaatgactgatgaaagataatctgcattttatcccttaagatgggtgtttatatcaccaagagcttggaaaatggatcaattcaagataaaacattttgctaacaactttcatggttcactggcagagaaaagaaggcttattagcttggcactccagatatggccttgtccatatggtaaaaaaaaataccagatttttcaaaagtcaatcaaaccattctggcctagctattaaaataaacagcatggtcaataaaactggtggtgttatttaagtccgtctgttatctcccaaaagactggaagaacattactatcagaaattgaatctgtttttctctttcaaccccaatagcttctaacacagatcatgatgcatggcaagaacatattctctaaatataaaaatcaggacacagctgacatatggtctaacaataggacaaaaaaatggaaatacagatgaatataatgaggctcacagaggtcagataacttgcccaacatccaagttaagtggcagagccaggatctgaatccaatgcctcatgctctgtctacaatagcacctcccagcaccagcacacacctgcacacacaggtagaaaaatggctgtgaagccgcaaaggcaggctgagatcacaaagttaaggcccaatgaagagacagtctatactgaaaacttcttccagaatcctgaagatcatcataaacaaagaatagtattaaaattcatactcacacaaagcaagccatgttaactccaacacacacacacacaaagtgttagaaagcactatcaataaatattccaaaggtaagcaaaatgtgaagagcagccttagttaaccggggattgataattttaaatggtggttaaaatctcttaacacataagagttcttttaattctccatcagtagatatttatattggtggctccttaattttttttagacttgtgtttgaaacagaaatctagtggtaagggagaccagcattacgtttcctggaaagtatcaataagttaataaaaggtctagtccaatgaatatacttacacttctgaatacatatacatctacatctaccaaattttttcatttctaatttttaacagtagacatctcattatgttgcccaggctggtctcaaactcctggcttcaagcaatcctcccacctcagcctcccaaagtgctgggattacaggcatgagccagcatgctcagcctgcatttaccaagcttttaaggacacaaatttattccttaacatttaggaatttttactcggcatcaaaactggcacagctagtgaaagttaataatatgcacttcatacaaaccatttaacatggttataaaagacagacatgcagcatttcataatctggaagaaatgaaaaatacctatttacacatttatctattttcttttctcattgccagcatcagccagtcagaattccagtccgtgctgggtatatttttaagttttagattagctactctcccccaaaaaactaagatataactgtgtttaaagacaggtgcctggaattttggcttttaagaagttccaaccatatgtcccccaccctgtatggtctgtctctggctctgatctgatcattcatataaaggcacagtttaagaagaagaatggctcttttctgcacaagcatcctattaatctgagggcccatctctcaacttctccgcatgagagccatactccctaggtggcagcacagatgcctgggatagcagtcactacctgagtccaccaggcacgctgcacatccgaggccacatgctaggctgcatctaaagcaactagagaaatattttgaaaataaggtatatgcatggatagcaatctcatctggtgagcatgccacacacgagatgctttgttctttccaattgatggcatactcttaagaatgtggccaaactatgtacttcctgcctgctgcatacaataagtccatcctaattcttggaacatatgaaatagaaaatttacacgttattatcagctgtttaaagaattaaagaaaactgctccccctccacacacacacagctttccacagcctagaactcttagctttaagtacagttaaaaaaagaaaaaaaaagttggatcaattagcagccttctgaatgctggaaacatcttaatagtgtctcagagatgaaagagcataatacagaacgagaaaaagagagaaagttaaattatgtctgcagtcataatgaatcaaagcccagaaggagtctgcaaatcagcaggttctaatgaaatattaaggtaagtgattattgatgaaaaatgaataaggctttttgatttcagcaacctttaaatcatacctagctaattaaaacaactcaaatgcattcatttattccttgacgggcatttagctacccttgggtatacagagacttcattttaggagatatgtatgtagttgacccaggtaagtggaaaaaatgtgccagaaacagacatactcagtaataaaagaaaaaaaagtaagccccttttcagattttgtttatcatttccaagctggaaataaaaaaaaaaaaatcactcaagatgtttcctgtttaccataaagcaaacatcaataatagtacactacatatttattaacatagaacttattttaattatcatataatgatacaaggcatttataatactaatattatgcaattctatggcagattttatttaaatatatcatacagctattgaagacggccttatcattcccctccacacttccaggaggaaagcagttctctcttaagagtgagaattacccaggttgcatcacaagctctgagagaatctgactccaggcctgaggcctgcacgatcttcaatcacatcctctaatatcataaacctctttcaccttagtctcctgttatggaaattaatctttagctattcaagtgaaatactataccaaattactaaagattaagacgcttcctaattacagaaattaatcaaatgtccataaccatgcccattttagcagcagtatgtaaggtaaagaggtacagacatcagttgtatcatgaaatacaaaggtgacaaatctaacttaagtggtgtttacacataaaagatgctaaaaataagatacagaatccaatatcatacccatgcaaaaacaatctctgtggcaaaccttttagctttgaaatgcccttagaactcaagaacaaagacgacggtgatggtagtggtggcatcatacgaacaatagcaactaacatttatgggactgctctgtgtgccaggcagtgttcaaagtgccttacatgtagtcattcatgtcatgctcacaaaaaaaccccagtgaggtaagtgttattatccccgttttgcagatacaagaagtaaggcacagaaggttaaatggcagagctgggatgtgaacttaagctggcttcagagcctgtgctcttaaaaatacctacatcacatcttaccttatcatcttatggtatggtgttgtatcaaatcctcttttgctcttccccctctctctctctctcaaaactatacaagttctaagaaacctacaagaattataagtttaacatacaataagcaaaagggactttaacacttaaaatgtttaactgcattttgctgacagaaactccaggtttcttttctaaaaacaggctctctctgctcctacacagcttacagtcttatcacacatacatcccataaactgtctttgctgtgctgatgaggagtttggtttatccattccttaatttattgaacatatttgaatgtctgtgtggtagaacttggaatacagcagtgaatgaaacagacaacagacaacaccccctgccccgctccaaaatgcaacttcattctagttggaggagacggatgataacatttttaaagtgcatttatgccgcatcataatgccataaggactagcaagaaaaagaaggcagggaagggagtcagggtgtgctggggagggggaggggagagctgcacttttaaattacctgcgtgtggtcacgtcaactaacaccagtcactgcgtggtggtgctgcctgcctgcccccagctgctgtgctttggggacagagccaggcccctcagaggcagctgaggtccctacaggtgtgtgctcctgagagtgtgacattccatgcagaagcacctctgactcactccctcctaaggactgaggctcctgtgacgtcccagaatttgcctgggctgccaaccaacttgttatctcctcgtccttcctctcccttccccgttgctctccttggaagccacacaggcaaacttaaccctgatggccatgggcaagcgctggcagagtccagagaggggtcaggagagacagttaatggaaaagggtgcttcctgtctgcacacacctgtctctacagtgatctgaaagggaaatggcagcggcccttgctgatctgtgtctcagccctggatcatcccgacacagtggagtttatcaccagtgcctgcatgaagcatcattgtttattttactattattctgagaacacaacttctgtgaatatatatgtttatgtgtgtgtatatatataactttatatatatgtgtatgtgtgtatgtatgtctatatatatatatatgcatagtcatttgttacacattttcaagaacggactagatataaaagtggggaaatggtgctctcatgcccttgctgtaaaggaaatcatagtgaacgatcagaaaaccacctgcacttttaaaaatcaactgacatactgtttcagttataaatgggtaggatgtaggaaactgtgaacctgttggtctgcaacagtgttcagcaaggataacgctatatttacatccagtttgccttgatctggtataaaagctggaaatcttattaaaaaaccaagacaattcaaagatgtgctggtctttacaagaaactgtgggagtaggttttagatttgtctgttacaaagagagactaatggaactctcccagatgcaaataaaattccttacaaataaatatcagaaggaaggtgtggactcaatcattactttacgacatttgtctgtgtatctgaaatggcctagtaaagtagtttgtgtcaagtaggtgcgcaacagatactgtccttgactcacattagttctttaacccctcatgctccagcaaagcctacaggccctagcaatactgtaaatcatgtgtcattcacagtcatgaatggccaaaccaagaatgttaaattcttcaaatgcttaaaactatattaaagacattgatattctgacagacctactctggaactgatccatacagtcacaatcaccacccacagtgatgagccacggtacctgaggcctagaagccatctggttgctaccttggagggtctgcagcatctcttcatggcctggctctccctcattatcccgcaggtcttaaggcctcagctacctgaggtttcaggacaccatgagtgtagaggctaagcaatccttaattgctgaaatatcatagaaagtttcaaagaatcagacgaccactcagagaagacacagctgtctgccagtggcttttcagggcaagaggtatctaggaactttcacagtaaagtgttcatcatatttaatatttaccaggaagatataaatccagtaccttaactaggtcccctgtctgtcaaaactaggtcagcatgttgtcactcataagtgggaccttaataatgtggacacacagaagcagagtgtggtatgacgggcagcagagacttggaagcgtgggagtgggagggggctggatgatgagaagttactcggtgggtacagcacgcacattgctccagtgatgggtgcactgaaggccctgacttcccacaatataatataccaatgtagcaacactgcacttgtacctgatgaatacaaacaaactaaaaaaattttaaggccgggagtggtggctcactcctataattccagcactttgggaggccaaggcgggtggatcacaagatcaggcgttcgagaccagcctggccaacatggcgaaaccctatctctactaaaaatacaaaaattagctgggcatggtggcacgtgctgtagtcccagctactcaggaggctgaggcagaagaatggcgtgaacccaggaggcagagcttgcagtgagccgagatcgcaccactgcactccagcctgggcgacagagcaagactctgtctcaaaaacaaaaacaaaaacaaaaacaaaaacaaacaaaaaaattaagataaagttacatttgttataacatctatgatctctctttttgtcattgtaattgtgtaatcaacatttaaaaatagtgatgaaaggtgagtattaacatctaggtaggtaaacgtgtgtgtgtgtgtgtgtgtgtgtgtgtgtgtgtgtgtgtgtataaaaatttagctctttcccatttaggaattcaggatgcagctcaagcacatcaccccttagaagcccatccttcctcaacctgagtcagtctccttagcatcctatttaattcttatcactctgtacacaatgtattgagtgtggtctgctatgtgataccaggtggggtgaccctgaggggtgaataggtcttattcatttccatccctaccacaggcacctaccacaattcttggcccacagtcaaattgtggggaagtgagtaatcagtcacaaaggctgccagatacactgacagacagatgtgtacaagaactctgggcttgtgcaaagactttaaacccttgactatttcacagggctgaaacatacagaccaaaggaaagaaggaaatagaaggaaaagaataactagaagtctgtaacctcaatcagctttagtttttgttacaaagcaggtattttttaaattatgctaatagcttgcaaaacccccaaaaccctcccccacaaattctgttgcaaccaaattctaataatttacgatttaaatcattttttagatctccctcctttctgccacagaccacacagtgactttgtgaaatacagagaaaaccctcattcctcaagacacttggctgccaactgccagaaaaaaaatcaccggaagtgttccaatccacgctatagttttatagcaccccttggagttgtattgtctgtaccttgctcaactggtcctctacaacctcagcacaccccaattccatttgcatcctgcccttcccttctttaaaaatcctaggtaataatagaattaaaaacaaacttggagttaaatttttattttaccactgcactgccttctaagtacctgatacaggttcagtgtattatataactttcagaagactaaaaaattactgcttttcaaactttctgcctggtaatgaatgacctgttaagtaatcaaagcagaggccagagaaaagaggaaaaagatatctgttaggtggttgtcatgcagatttatctggagggaactgtttccaggtcatgatcatcagtaagttctgaaatggcaaacttttttccttttaaataacacttttcttcatggaagacgacaaactcttatttttaaatatattttcacaattccagaattatatgaagtcaacatgaaactaaagcagtatttttcacagaggtgatttataattattttacacgccactatttgtagcttttgaaaatttataaagaaacgtacttttccactattaagtacatttttctatatacatttgtagtataaataagattttagggggattcatttgaggggaacttagaataactactttttattccaatggtgttggaatcaacacatgaatcacatcaaaacaaaatgtaagcaaatctgatttcaaaattggaattaaaaacaacctataatagagtttaaaaaataaagatttactaactgaagcagtgtaagcatttcatctgagttgctggatacactttaaagttcggaatatcatatctttcaacatattcgctaattattcactaattcagactttatatcatttcctctacttagatggacattatcaatcaattccaagtactgaagcttttgtccgaatttgtgcacatcagggaatcctctggcctcatgaacttggtgttcaccatttcatctggacactctgcagctttggtcatgagctgagctccatgggcttctgctctgtcgtttgctccacacttggtcaggccccaaaccctggcaaggttaccacagccggagcagggccaggctggcctctctcggagacaatcaggactttcagttaaaacaaaggtgataaggaagtgcagtctcaggctaagatcagtttcttgcctgtaagtgatatttaatttacatttatagtctgtaaaaacagttaagctgcaagagacatccacccacctcaccaaaaggaatcaccttggaggcaactacctggtcccaaagcattttgttttaggaacaaatattttcaaatccctgtattctcaaagagtcaacccaagaccccctatatagtctatggaatagaactagtaatgaaaggcataaactgatacagaaaattcagtttaaaaatatctgtcagttttacagaaatgtatatatacaacaatctacattaattcactctaacattggagtccattttatgcaatgtgaaatgcatattcaaaatagttattacatagccatagaacaaatgaattatctagttactttctgttctgtaacgatacagaaagtttataattttcacatttctatgtacacacctgttttaatgaaaaatactaaggatatctcaacttgcttgattggaaaagaaaacaggtatcttttaaaatcaactactgcatctcctttagttacacaaaatcaaccaattggggaaaaaatggaagaagacatgaaacaacaagagaaagaaagtaatcaaatagttatttacaccaaggacttagggtacccaaggaaaagctctagaacatctgggaagttaatttaaaactggattgcggatttagggctcgataaagtctcccaagaagttgaaaatgcatctcacaatgggactccacataaatcctcatgaatttttattaatagttgattgatattccatccttatgcaggagcaaggaagaaaataacacaaacttaagatcacaaaataccaacaagattggtacttgaagccatgggtttgtactgtctaaaggacaggagaaccaagtgattaggtcaaaataaaaagatgagttatcgtgccaaattgcacatgaagcaggatcttggagcttttgttagaaggctaaaattgaaagaaatcccaggcagctccaggagattttgatcatggaatggcctaaaatctctttaaagacctaaaagttcagtggtctatgaagggaaagacattaaaacaaaaatgcagatactctgctggaggattatttgcctgctaacgaccaaagtctaaaacagctttcatttatccccacatttctgcagaatatttaaacttcctctaaggctaaaataaatacataaataaacaacccccattacacattacttctacaaacaaattgtggtttcgggcaatgttaatcaacaaaaagaattaaacaagaagtctttaaaattagccatgaccttatttatggcttcattactttcaagatttcatttgttgggtgttttatgtcacctcagcctttaatttcattgctgcatctctaactatattagaatagcttaatggatggtgattgcttgtttttaactcaccaaaatttaacatttgcaaaatgtataacaccaaagagccacgtaattcacccatgtattagatgcaattggatttatccttttaaactgatcctatagtatgatgtgaaccaatatgacacagtctgatataattagcctgagattggatgtcttacaggcccgtaaacaccatactgagggcttagactgcatcttggagacaataagccacagaattattttaagcaagggaatgacatggtcatattttgtttcaggtacaaaactccaggtactgggtgaaatacggacttgtggagaacaagactggagatgggagaggggtcaggagacgaccatcagtatccatgggccgcacgacagaaggagagaaggatgtggaattacttgtaatggcaaattggtagggctttgtctctgactgttatcggggggagcaggctacaaaagaaaggctctggcttgagatgtgtgggttgtgattgcgtttgctgagattaggctgttgaaactagaggaggtttagaatgaagaatgatgaattctgttttagatcagttgggatcaggtgactgataggcacaggaaatgtgcattcccagctggtggtgctggagaaatctggggcttataaagagagaactgggctagtgagatcaggcatcattatgcctaatggtagtgaaaaccttaaccaagaaaaacacataggaaatagcagtggtccagagctatttccctaggaaatccaaaacctaagaggaaaaagtagaatagaacctctaaagagacatctaaagaatagttcaaaaggacacagtggctcacatctacaatctcagtgcttcgggaggccaaggtgggaggatcgcttaacccaggagttcaaggcagtatagcaagaccctatgtctacaaaacacagtgagactccgtctctacaaaaaataaaattagctgggcatggtggcacctacctgtagtcccagctactcgagaggctgaggtgggagaagcgcttgggcccaggaatttgaggttgcagtgagctataattgcaccactgactccagcttgggtgacagagcaagattctgtctctaaaaaaaaaggatagtttcaaaggaaggggaaagcagtgccacaaaaacaaagagaacagagtttcaggaatgccacagagtaatctagaatgcaaagcactcaagtttcattgaatcatgcttctaggaagcaattaggaaacaaatacacgatgggtactgcaacaaatcaccacaactgtattgccttgagacaacacacatttattatattatagttctgggggtcagaagtctgaaatgggtttcaactgggtgaaaatcaaggtgttggcagagccaagttccttccggaggctcgaggggagaatctgcttcctcgctttttttccagctactggaagccacctgcatcccttggctcatggtcccttcctctgacttcagtcaatagggcagcagcttcagttccttcctgactctgccccttctgattccctctttcactgataaagccttgtgattacactgggcccaaaaggataatccaggaaaacctccccatttgaaggtccttttcacctggtgagataacattcacaagttccagaaattagggcgtgggcatctttggggaagcattatcatgcccatcatacaacgagaggaatgaaccagagatgtgggagagaagatatggcaatctacatcaaatgtattaataatccttcaagaagtctgaattagaagtgaagtagaaaaatagggaagcaaatagctagatggtaaaaagggaatttttctttttttctttttgagagacagaatctcatttatcgcccaggttggagcgcagggtctcattctgttgcctaggctggagaacattggtacaacaaccatagctcactgaagcttcgaactcctggactcaatgatcctcctgcctcagcctcccaagtagctgtgactacaggtaggtgccactatgcccaggtaattttattttttgtagagacggggtctcactgtgttgcccaggctgatttcgaactcctgggctcaagcaatcctcctatgtcagccttccaagtagctgagactacaggtgggtaccaccatgcccagttaatttttaaattttttgtaaagatgggttttcgccatgttgcccaaagtggcctcaaactcctgggctcaagcaatcctccagactcaccctcccaaagtgttgggattacaggcgtgagctgccacacctggccaatttttttctttttaaacagtatggtagacattaacatgtttacatggaagttccagtagaaaggcagaggctgaagacaggggctcagaggagacactgacggagcaggtgccttgaagtggtggggctgggatctggaagactgtttagagagctggcctggaaggaggaaaggtgatcttcagctattaaggagaggcaagtggcccaggcacagatgtggatgggctagaggtctggagctgagttgtgctgaagggaccaacaaagtttggaagagttgctaacatgaatggagaaggagctagccaaggccagagatattagtagacagccaaggacactgagatcaggcccaggttggatggagcacattaattagcaaaggcaccaacttgcagaactcacattacaatgagattgactaccttcgagaattactttctcacatttcaagaaaagcagaggtaagtaatactaagcaaacataaataaagtggtatttgactttttcagtagcaaatacaactttgttatatgacccaacatttctaaaagagcacatgtttaataagtgcctatatctaagaaaattagttttgttctgtgtttgccaggcttccctttgacgcaaccggattctgattttaacgggaggggaaacaagttcacaaaggtcttttcttttaaaatcgacatttttctctttagtggtaaaatgcatgcaaaaagcatgtgattatggtatttatgtttccattaaggtgtcctcagcaagcagggggagtctagcctactattttcttgctatttagatttatagtgacacagttcgtattttattcccattatatttgaggacaatgcactcctggtggcaaatgattgcatagtgacagtcagcaaatgtccattaaagctgtctttctgtagaatatttaactacagattctggtctctggatataaaaatacaaattgcatggtgtcttcaagcaaataaaaaaaacattattgaccaggattttatgatttctttgttaagaatttaaagtgtactaaactttccaaattagaattgtgtaacctataggaaaagaaactttctggtgtcaagaaacactgaacaggggctgggcacggtggctcatgcctgtaatcccagcactttgggaggtcaaagtgggtggatcacttgaggccaggagttcgagaccagcctggccaacatggtgaacccctgcctctactaaaaatacaaaaattagccaagcatgatggcacgtgcctgtaatcccagctactcaggaggctgaggcagaagaattgcttgaacccaggaggctgaggctgcagtgagccacgatcacaccactgcaccccagcctgggcaacagagtgagactctgtctcaaagaaagaaaggaagaaaggaaggaagaaaggaagaaaggaaggaagaaaggaagaaaggaaggaagaaaggaaggaaggaagaaagaaagaaaagaaagaaagaaagaaagaaagaaagaaagaaagaaagaaagaaacaaacaaacaaacaaacacacacacactggacagaatgcagtttaggaatatgacacctgcaagatgaccttttaaacaaaatgattatttgatcatagatgaacaatggacattataaatgccaggataaagctgtgtctgacagaaatgataaattatttcacagcttcactgttaacagtaacaaactaactcatactggagttccaaactgtttttttattagcccaagagtaatattttccaaaggatggctgcatcagagtcaactggggtacttggtaaaaatgtgggtttgtagtcaactacatctactgaatcaaaatatctatgaggggaggtcaggatctgtaagaagtgctccagggtctttctacatatgcttaaattagaaaaaccactgttttagaacaaagcctattacggtttttttttttaaatgtttttattttttagagacgaggtctcactctgtcactgattctggagtgcagtgctatgatcatggcccactgcagcctcaaactcctgggctcaagcaaccctcccacctcagcctcctgagtagctgggactataggtgtgtgaccaccatgcccggataattttagtgtttttaagagacagcatctcgctgtgttgtctaggatggtcttgaactcctggcctcaagtgatcctcccatctctgcttcccaaaatgtggggattatagatgtaagccactgtgcctagcctttacagttcttaagatcatgattcaggcttgcctgtccctctaagatataacttgatgtaaacagaaatgccaacattttagacaaggtttgagacgttcaagctgccctatttccatggagtattgcaaactcagactcagtaagaattttatgaaagcaaaccatgaggaacttcaaagaatttcatgcaagtacaaaatgaaaaccttcaaattaccaaaccaaaggctgaaattgattgagaggtcaggtccttataccatgacccacctgtcactctcaaataagacatttcatgctacccagcatttactctattctaaatatttatattatagaagccatctggaatgccttatcctgaattcagtaactcctaatttaaagggaaacagttcatgatgtgatgtaatttatggagaatacttaggagaccaagctatttaatgaaggaagtggcatcagcagaattgcattcccacactcctatatctatgttaagtataaagaatcaaacctgtctttattgatttcaatttcattccttgcttgtttctgcacctatgtggcgatgctgaaagcatatgtgttttcctgagagtaaaagcccatttcctaagtaacagttgcaacagcaaacaaatagtgcttactacagaccatgctcagtgtgaagtgctttatatgtcattaacacagttaatccttcccaaacctaatgaggcaagtaccattattatccccatattatagatgaggaaagtgaagcagagactttacacagctgatggcagaagagcccaggaagaagagcacggtggctcacgcctgtaatcccagcactatgggaggctgaggcaggtggatcacttgagcccaggagtttgagaccagcctgggcaacatagtgagaccccatctgtacaaaaaataaaaaaaaaatagttgggcatcatgtcatatgcctgtagtcctagctactcaggaagctgatgtgggaggattgcttaagcccaggaggttgaggctgcagtgagtccaaatcatacaccagcctaggtgacagagtgagaccctgtttcaaagaaaaaaaagaagagcccaggatcaaactcaagtattctggctccatagttcattctcttgtacgttacactcaactgcttcttactttatagcaggattgttggtggaaataggagttatcagaggatagcagtgtcttaaagaattaagaagactagctgctggcagacatttgattggtaacatttctttaattagatgcataacaaaatgaaaggcagaagagctaattgagcaacactggagaatactgctcattacttaatttcacaaaatattgtggaaattatttgaccaggggatagttctctaaaatatacacaatcttgatcaaaagacaatgattccctttgggctcttctgtgcacaattcattatacagatggtcccggacttgctatgattcaacttaagatttttaactttagatagtgcaaaggtgctaactattcagtagaaaccatactttgagtacccacacaaccaatctatttttcatttttagtacagtactcaataaattgtacaagatatccaacacttcattataaaataggtttcatgttagaacagatgattttgcccaactgtaggctaatgtaagtgttctgagcatgtttaaggtaggctagctaacccacgatgtttggtaggtgaggcgtattcaatgcatttccaatatgttattttcaacttacaatgagcttatcaggaccgaacaccattgaaagttgagaagcatctgtattcagaacggtttttggcttcatgaaatagaaacctgattgcaggtaacttaaacacgtaacaaattcacttttcacaggtgataagaactagaagagctgctcacaggaccagactgctatcctcttccttcatgtagcctacaactttagaatcagggaaaatggtaaaggacaaaatgagtcagccccatttcactcaggaaaagactagctttataggaagtccccactctaggtacactcctcacttaggagtcagaactacgtcacatggtcacctcttaatgcaagggagcctgggaaacttttagctaggcactctgctagccagaaaaaaactgggattttttttttttttttttaagagacagaatcttattctgttgcccagactggagtgcagtggtgcaatcatagctcactgcagcctcaaattcctaggttcaagtgatcctcctgccctggcctcccgagtagctgggactgtagatgcatgtcaccacgcctggctaatttatttttatttttgtagagacggggtctcactttgttgcctaggctggtctcagacgctgggcttcaagcaatcctcttgccttggcttcccaaagtgctgggattacaggtgtgagccactgtgcccggcctacgccaacatttttgtgagttttaagccttgttattcatatcaaacacaaggataggatctgcttctctttagcatcaatccaaggtgaaaaatcaaaatgttacccacgacactaataaacagtagtaacagtgacactgtgactatagcctacagttcatgttataataaaatcaaacagacatgggactatttctagacatggcatgatgctatcttataaaaagcattttataagtaatacgtggaaattgagaaaatgtcccattttgatgccaaattcaccacatttaataaatcatccctggctgtttccatgtggggctaccagatccatatttctgactataagatcaattaaaatgattaagcagtgaaatgtagaacactgcttccttactgaacaatgaaaatcccagaacagatgcaggctacacatcagactgtcaactgcctgcattcccatgaaatccaaaaatttgaatagtaaaggtcactggacaccaattgcaaattttggtggaatttagtcagttgacaggagtttctctattgtgtctattcttcatacaggaaataatctctgcggagttccaagttgcatgtttccacttgaataattacttttcaaaaacgttagtataagcatattctagatcttcttacaggcgtgtcatttcactgtctgaatttgggtttacacacatgaaggcacgatggaatgctattttcactgtctccggttaatgacaacagaagcgggctgaacttcgtgcacacatgatgcccctgtgggagctgcaggccaaaggctgctgaacaggaacatacaaaagaactgcagaaattcaacagagaaaagggatgggcaagactgtgggggtcggcaaacaaacccaaatgaacctgccatggagcagccaccaccatattcatgatttgtgcaagagtttagatttaagaaacattattggccacattaagttaatgttgttcatttgaaggtaatggctttgccatttttgtatttaatttgtaaagatgtttggctttatggttgtataatggttgtcaacagaaggagtttagtcctattttatttttacacatatttaagtaacattataatcaaaacaatttagttcaatactgcagtaccaagagattgtctttctataaaaaaaaaaaattcctatactcctcaagtctgagaaacacttttctatgtagctttctctttgacaagaacagacaatggaggtgataccatgacatcacagccaaattcacatcctgttaaaggcagatgaagaagtgctttacaggtatgataattcccaactttttggattagtaacatcaatctttgtttaatggacatcttattctctgcaaaaataataattacaaaaaactaaagtttccatagtcctttttcttaaaaatataaattatgtctctcctgagttggaagcatctcacaaattatctagtctaatcacccttctggggcacaaatgcataaaagtatcgtaagtctgacagctgctgaggctgtgcttgagttaggatgagaggggcttttgaatacagcaatgtctaagatgtgattctgagttacttactgcttggtgtaactcatcctcatgactaaagtctcctccagaatgtttctctgagtgcattttggcagaaattaggaggctgagtttcagtttggggttagcacagtgcagggtacagactccaagtggggatgctggagtccagaaacagaggctgttctgagcatgtaagtgctactgaaaatttgcagacatttacatgcaagatttagactcttgtagggcactatgatttaaactggggtttaaagcaaccacttctgggcctcaggagctgggaagacagaacccatctgactcctggctttgatgtcatgtgggacttctgagctgtgtgaaaaactgctacgtggtagtctactatttttcaggttttcaaagtggatgtggaaggtgctgaaaatgatgagtgcttttatcaacgatcaataatatgtcaactaatttttttttttttacttcctccaaaagttactaactgacaacgccagcattctggtgtcctttctcccaggaaaacaattccaatgggacattcatggccttcaaatgctgtttgaccttctataagcagcattcacaagtatggcagaaaccaagtaagagcttttaaagaaaatgtcattgtcactgataataattgtattctttggatcctgacatatctgtggttagataataagcaagtgaaccttctaggtgatcacagcaaaggggtctaaataaaccatatgcctcctatgttaatttacattattcagtcattatagtcaatatcaaacagacctacagattttcataagaccataaggaaaacctaaaacccaacaaaagcaaaacaaagcaacaaaccaaatactctggctatagcatttcaccttaagatctggcttcacatttgctatttttaaaaatacttcttcctgggtttgcctaagagttacctgttgcatctgcaaacctctattaaaaacaactggaagtaggtaaaatagaaactgggtgcaaaacgtagcaaccaataacacatggatgctatggatgaagtatttcccgtacatctctagccttgtgagggttcttaacagtgccatccccaggaccaatggtaccagcatcaaacctggacatgggtaagaaatgcaaattattgggctcaacctcagacctactgaatcaaaatttggggagagtccatcaatgtgtgttttaagaagccctccaggagattctgacacacactaaagcttgagagcccctggttttaatgaaacctgctattcataatgttcaaggcccagttcctaaatagagcaacacttataagaaaccactatgagagatgatgagctgagtgtatcatttatgacaataacatgcgtatgtctgatataaaaagaaatgattatttgtgaactaaactcctcatggtgcttgaacatacaaatgaaagagcgggaaaagatcgtttaaaaattgtttcagttaaaattttaagtaaatatatagccattaaaacacaaatgacatgcaaatcaaaaccataatgagataccatctcacaccagttagaatggtgatcattaaaaagtcaggaaacaacaggtgctggagaggatgtggagaaataggaacacttttacactgttggtgggactgtaaactagttcaaccattgtggaagtcagtgtggcgattcctcaaggatctagaactagaaataccatttgacccagccatcctattactgggtatatacccaaaggactataaatcatgctgctataaagacacatgcacactatgtttattgcggcactattcacaatagcaaagacttggaaccaacccaaatgtccatcaatgatagactggattaagaaaatgtggcacatacataccatggaatactatgcagccataaaaaaggatgagttcatgtcctttgtagggacatggatgaagctggaaaccatcattctcagcaaactattgcaaggacagaaaaccaaacaccacatgttctcactcataggtgggaattgaacaatgagaacacttggacacaggaaggggaacatcacacaccggggcctgtcatgggatggggggaggggtgagggaaagcattaggagatatacctaatgtaaatgatgagttaatgggtgcagcacgccaacatggcacatgtatacatatgtaccaaacctgcacgttgtgcacatgtaccctagaacttaaagtataataaaaaataaataaataaaataagataaaacacaaataacagataaataaatactgaagctgaggaataccccaaatatcctgacatgatcattacacattctatgcatgtaaaaattactcacatgtatcctataaacatgtaaaatagcatgtatcaattaaaaaatacagttaacattgcactcctgtgtgctacactgatatacataatttagacctgtggtctgtggctgttaataagcaatctgttatactatattattcttctcatttaccgattctttcataatataaagttatgctgcctaaaaaaaaagtgatccatctaaatcataagtggaacaaatcatgtcattccccatctatttaattgccacacctagaggctctcctagcaataaaaggacatatcacttaagtagaagagtcataattttaagtttgctttttatttgagttataaagtagaggttggttctcaggtataaaaccatcttcagaacaaaatgaaatatgttggaatcattagaaaagccatcaaaacctctgctgatccttccattaggtttcaatttgtgtaaactcaatacttttagacacaacagctttttaaaggccattaataaaaggcaattctggtttgaggattgatgaatggtctactcccctgtcagaagctgtataaaagctgatttggaagcaataccacgattgcccctggcgcctacctgtctacaggtgagggtttggaattccgcggcttcttgacttgggcatacaaagcatccatcatatgcccttctcgtgggctctgaggtctagcgttgagagccatggaaccttcataagaagaaactcccccatacattaactcatcatcacagccaaatgtccgatgaaaatcttgaatttcagcatagtcacgctctcgagcttgtcgttccctaaattctcgagttttggcttgaatcctatgaaatcagaacaaagttgaaataagagaaacctttccttttttaggaactgcatatagaaacattcatcaaaatatgttgtaaaatatatttgatttcttgcagctatagaagatcagtggtataaatgacaggtcatacacattctagattgttaagtaatgctatggatgctcaaaaagaataatttgagatgccctttgttcatgtctacaagattgcagtcataatttaaatcttttttttttttttttttgagacagagtctcactctgtcccccaggctggagggcagtggcatgagatcttggctcactgcaacctccgcctcccaggttcaagtgattcttgtgccctagcctgccaagtagcagggattacacgtgtgcaccaccacgcctggctaatttttgtattttcagtagagatggggtttcaccatgttggccagactggtctcagactcctgagctccagtgatcctcctgcctcagcctcccaaagtgctgggattacaagtgtgagccaccgtgcctggccataatttaaatcttaagtttaaactttcacttattaactagctttaaaaactcgcaaggaacagatcatttctggcatctacttggatattactcatgaatttgtttaaggcaagaaataatttttttaacgttacatacactttatatatgaaaatatttatatgtaatatatacctatcttactcattattaatacaccataaacattcaacctactatgaagcttaaacacgaatccacaccataactcttcattagtgacaaaagaggatctcagcttaatgacatcgactctgtcatttcatgggatgcatacagaaatggagaatccttaaattaaggactagaaggcatgtatccaatcaaattgtgaagtaaaacttgcctacattacaactaagaaacaaaccttaaatgctcacctttactgaagttacgtttagtttactatgattttattaaactatttggtacaatgtcctcttcaacttataatatattgatataatttatgtcctaagtcaatcttagttacctggaaaaaattttaaaaccctcaataaaattttaatggaaaaaatatctcctttatatacttacaaatttaagtacacacttaaatgcagtaaaatcttacttctataaagcaacactttagactgaatataatcttttattgcagttattcttttcatgtttgaagtagacctctgctagcaaaaacaatacataaacatatattcaaaagaattcagaaaagataccaaaatcagataaagacagcagcaaagaaaaggaagaaagaaaagaaagctatataggccaatattcctcatgaatatgaaagcaaaaaacccttaatgaaatattagtaaatgaaattcagcaatatataaaagaaattatacaccgtgaccaaatggtgtttactgcaaaaattcaagcctggttcaatattcaaaaatcaattactacaatccatcatattaacagatcaaagaagaaaagttacatgattgtatcaattgatgcagaagaagcatttgataaaattcaacacccatcatgtcagaaaaccttcagaaaactagaaataaagtgaaacttcctaaagttaagagcatctaccaaaaaccgacaggttccctcatgcataatggagaaagactgaatgctttccctatgataaagtaaggatgtgtgctcctaccactgtaattccacatagtgttggaagttctaggcaatgcaataagcctagaaaaggaaataaaagtacacagatggaaaaggaagaaataaaatgcttcttacttgcaaatgacatgatgatctacaaagaaaattccaaagaatctacaaaaatctcccagaactaaaaagcaagttcaacaaagtcagaggatataagatcaacatataaaaatccattgtattctccatatgctggcaatgaacacgtagtcactgaaattaaaaatgcaatgctatttataatccctaacgaaacaaaacacacagatacacatctataagccaaactttcgtttatgtagacctgtgtaagatagatacgttgaaaactacacaatgctgcagcaaaaacaattcaatgtaataaaatagttttttcaaccaatggtgcaggagccatgagataaccataggcaaaaagaaaaggaaaaataaatttcataccttactaaaaaattaactcaaaatgggtcacaggtttaaatgtaaatgtaaaagtataaaacttaagaaaaaatgtaagggattctttaggaactagtgcgtggagaagggtttttaggactaataccaaaaccattatccataaaactttaaaagtatatacattgaacatcatcaaaataaaaaacttttcctctgtgaaaagctctaattagaagatgaaaaaataagtacagactagaaaaaaatatttgcaaggcacgtatctgacaaaggacttatatccaggaaatattttttaaaacagtcagccttctcggctcatacctgtaatcccagcactttaggaggctgatgggggcgtgctgcttgagcccaggagttctagaccagcctaggcaacacagtaaaaccctgtctctacaaaaaatgcaaaaattagctgggcatggtggtgcacagctgtaatcccagccacccagctgaggtgagaggattgcctgggccctggaggccaagactgcagtgaaccatgactgtgccactgcactccagcctatgtgacagagcaagatcctgactcaaacaaacaaacaatcaaacaaacaaaaaaacaaacaaacccctgaaacctcaacaatgagaaaacaatccaattagaaaatggcaaaagacatgaaaagatgtttcactgaagaggacatatggatgacaagcatgtgaaaagacgttcgccaccaccagttaatagggaaatgcaaataagaccatgatgagctattactacacacctgactggttaaaataaaaaacagtgacaataccaaatgcagccatgaatgtagggaaaccgggcttctcatatattgcagttggaaatttaaaatggtactgtcaccctggaaaatagcctggtagtatctttaaaaattaaacatatacttatcatactgtccagtaattgtgcctcccggtacgtatcccaaagttgtgaaaacttatgtccaagcaaaaacctgtatgcaattgttcattgccaaatattaccttatttgtaatatttaaatattgggaacacccaaaatagctcacaataggtgaatagttaaaaacaaaaaaaacaaaaaaactggggtgtgtccatatcacagaacattactcagctgtacaaatgaacaaactactgatacatacagcaacttgaatctgtcttaagggcatcatgcaatgtgaaaaaaaccccagtcaatctcacaggtcatatatgatttcacttatatagcattctcaaaatgacaaaagtatggagttggtgaacaggttagtgatggctaggggttagctacagaggaagacctctgtgatgaaatagttctgtttctttactgtaggagtggctacactaatgtgcacaggtgatgacacagaactacacacaccctataccaatgcgaatttcctggttttgatgctgtactacagttatctaacttaaccactgggggaaactggatgaagggtacataggacctctttgtactatattcataacttcctatgaatctaaaattattacaaacttaaaagtttttttaaagacagaaaattgtcacatagcattacaagcaaactttgcattttccttgtttctttcttgtatctagtgtatcaccatcaccccactcttggtttccaattttgaatacaggggatcaaatctgtctgacttttcttctctcccagctataaaaagtacataaattcacctagctcagtgtttctcaacaggacccaatgacatttgagaaggggctatttgtcatcaagcaggacttttaccagaactggtcacagccacatgtaatccagcagtgtccccaatggggcaacgaaaactgcttctcatgttccccaaaactctctaggagaaccttatttcctgaggtgacaaccaatgactttcttaactcaaaagtgaatattaggaagttagaaatttttatcaggactgttctagatcctagtaactctaagactgtaggttccacagacagaatacccacaagagaaacagcaactcaaattctaatgtcaaatttagctaaaattctactagacagtttttaaatttttacgccatttatccatttaagagcaattatgacagttaaggatgctattataaaagctggttaccactaaatactagctatccataatggaaggttgacaggagttaggagataattttattctttgcaccataatgtctttttgactcttgatttgaccagaaatcactagcagaaagaggaaaatgagttctttcttacattcaatgggatattaatttgaaactcaattatgatcacttatctgacaacccactatactatgatatttggtcaccattcatcagtcacttaatcataggtaatatccagggtaactaggcattcacataagtcttgaagtttggcaaactgaagaagtttgaaggaacacaacagacctaagtataattatataaatataaagctgaaatttctgaatttggagaacctccaaaaatcaaagagaaggactcagactgatttattaatgactaaactctatgatacatctagcttaattcactaaaagtgaaaaatccagcttacttacatcagaaaatgcatccctcttaagaaagaaagctaacagaaagagaataggaacacactcttttcaagggaggcataaacctaaataatctccccaaacttcttgcacatcagtttcattatattactgatgggttctggatttgaatattcttttgttccaaatgacgcagaaaataatattaattagcagtcaatttctaacaagtcaatctctcaaaagaagtgctcagcagcatgaagtactatttataaagcccagatctcagctgccttcttttacccaaatttgtacattatgactaatcgccaccagtcactgagcctaataaacgttaaagccccatctgtagtaccttccagaaatactgacttttttcaaggctccaataatgaaggaattgtatttgtattgcttatcttgtcatcaccaataatgttgtccccaaagttctaaaacctgcatcactgctttccaatgtggcagcttacactggtggtgaaaaccttagaataaaactatagcatacgtgtggtccaccaggtagaactactgccgcaaaaggctaacggatctggtcagtagcctgaactaatgtgcattctcaagttcattctagaaattaatgctaacgaggcttgctgtacaaatagcactttagagtagacttttgaaactaagcatgcactgtgattttcataaattttagtggcaattcacaagcaaaattaacaaaagacacaaatgaatttattatattctttgatatttgaatgtcttgttacaaagtgagaatatgaactttctaacacgaccaaaaggttatatttgcatgttatgtatttccactctgtggagatacatatttcagtaagaaaatatttggctcaggaagaaaacatgtttggtgtcctcataaaaataacatgacttcttaaggaaactttgaaaagatggtgagtatcttgcagttgagcccttaatggatccagatggccagggctataaaagcataccccctttactcttttattgtgaccctgaggtcacaaattatctccaagatgtaagagtcactcatttttctgaacagtcagattgttgttcagcattctctatcccatttatctcgggccaaacctcaacaatgacagaagtaactgattagtccaaaacccagcaaaagacataaatgtctattgctttaaacatttcagtaagtccttcctggttctaaaaagaactattctgaagttcagattatcacaggcagttgtaccacccgacattgatggacaacatttatactgtttcctatccttgaaacttgaaaaaacaaattcaaacaattaaaaccttttatcaagtcatttttaacttaataaagaacttatcatttcaacttgttatgttcaagcataaatacatctttcctttttgtaaaaaaaaaaataaagtgttccattatgataatgaaattgccttgaacctgcatagaaaataatacacaaaataatgtaatatactaaataaagtaataaggttaatttctttcctgctgtcactaaattcatgctaacagtctctcttcagcttgacatcaattaatgattttaattccaggctcttgtcacagtgttcaccaccttttctctaattaaaatggatgacgctcgatgaagataaaacacacaagacttctgtttttgtaacatttctattcattagtatttttgcttttacaataaatggcttttagcactaattgcagtagaataagatgaaaggaactttttatgatcataaagtctagtctttatatatccagaaaaggtaccaggtacgggaataaccaccgaagtgaccaaactccttaggatggaaaaccagtggtgtccttaaacctctcagttacatactaaatactttcatttccaaactccttgggatgcaaaaccagtggtgtccttaaacctctcagttacataccaaatacctccatttccaaagctatgatgctgcaacacatctctttttacatgttgtatttttttaaagactacaagaaatagaaactgtcttttaacgatttttaatttaaaaagttatgtctgcagaagatagaatatactaatattagtttaacagaaaaaatgtttttaataaatttcagattgctacatatcagatagttgttgactatcttcaaaacaatgttcaggatcttgcaatcaactcttttgggaaacattttacccccaacttactgcactgccatccagaagcctcattctgggaacaacagttcgtggatctttttccaacagtatttcttctctcaaaaagtcagtattacagaaattgatcaaataaaacccaaattcatggcgaaatgaaatttaagctacaaaacaactggaaagaaccgtctgttgagaaagcagttttagtccaccatggaaggctttattgggccctcagagtacttcagcagatggcagacttcaaaaatactgcagctcaactcatccttcctttgggtgatcctccccctgccaggtgaatctaacaactgccccctaacagtaggtaagctgccagtttggtgcctatgctgaattcccaaaagagagatactattccactaaatttcttaccctggtaacagttccaattttaagtgggattttaatatctttgtcatattagggtaaaagttgattgagaagaaaggacttccatattctaaatgagccctgaaaaaaattttcttgagtgaaaacaactgttttaaaggtacatttccaattccagggaagaatgcaagttgctgaaatatatagtggtcccttagaatagctgggagggaaagttaacttgcatccctcaatgctaaaatgagatgaaactggttttaaaatacaaaacggttaaaagttgaaaaagagataaaagaaagcattaacagggagactgctaaccactaatacaatcacaacttgtaaagaatccaggcagttaaaagactgcccactttccataagcctttgtgcttagggggagagagactgaaagtgagggtagaatttttctagtttgctaaattatacatattcttgggaataagatctagctcccaaactatcatctctatgaagcagtcactactaactccagccccactggtcgttccccttcccaaagctctgtaatcatctattttaacaattgattatattgtcttttccccctgcccagagacaggggtcttactctgttgcccaggctggagtgcagtagtataatcatagctcacttcagccttgaactcctgggctcaagacatcctcccacaccagcctcctgagtgtctgggactacaggtgcataccaccatgccctgctaattaaaaaaaatatttttagggacagagtcttgctatgttgcccaggctggtatcgaactcctggcctcaagtgatcctaccacctcagccttctgagcagccttacatcaattttttaatgttaacatgcttaaatctttttctcttaacaaaggtaagggatccctgagagggaaaaaacattttaaaatagtaattttaaaaagacttatactatctgatatggtttggctgtgttcccacccaaatctcattgtgaattgtagttcccataatccccacgtgtcatgggaggaaccaggtggagataattgaatcatgggggcggtttccccctcctgttcttgtgatagtgacttagatctcacaaaatctgatggttttataaggggcatccccctttgctgggctctcattcttctcttttctcccgccacgtgaagaaggacgtgtttgcttcccattctgccatgattgtaagtttcctgaggcctccttagccctgtggaactgagtcaattagacctctttactttataaattacccagtctcgagtatgtccttatagcagcatgagaacagactaatatactgtctgatacacttaatatattgtgaaacaacaaaaccagttgtcttatactgactaataaaacactagaataatatttccctaaccaacagacacaaacacatctcaacagatactcactcaagtaatgttcaggctttcatggatattaaagcacctacaattattgccaatgcagagagatgctcttaagccaaatatatctaggacagctctcatcagaaagcaaactgcattttcctacttcatttgcagtatctgtcaataaaatcggtttcagatatatagtatgcctaacgcttaattttcctcaagtattcatctatattttttccttttttttttttttttttttttagagacaagctctcactctgtcacaaaagctggagggcagtggcacaaccacagcagctcactgcagcctcgaactcctgggctgaagtgatgctcttgctaaagtgttaggattacaaagtgttaggattacaggtgtgagccaacacacccaatcaagtatttatcgaaatagttaagttctacaaagcaggttaacagattcttaaaaattctcatttacctgtgcaatgaaaatttttttaaaaaaacttgaaacttagcctattgattagaattgacttttctaaaggattcacgaggtcaaagaaacatgaaaaatgctgctacaggatagaaaaaatgtttctcttaaaaggttaatttttaaaagacaatctttgcatgacaataagtgatctaaatgcaaagattagtgttaggaaaacaaacatgtatcacttgctgaaaaggatcctaccaactgagatgacaaaaagttcaagtaattacccaaagcaggtattactgagaacagctggtaaaattagaaagagaggaaacggcatgcagaaaatccacataaacttgcaaaatgacacaccaagaatggggagtatcccactgaaggacacagatagttcaacggtctggtattgaaaacacaaggctttgaaagatgattagaacattgaataatggaaagtttcagatcatctgtttcctaaggagatttataaatattccttctatactgggaggatttaataagaaattaattaacttttacatatttccactagaagcattcagtatccctggaaatgttcccaagcacaacttactatgcagatatagataataatattgtaatagctttcaatggctgaataactacaaaatacaagccagctaacattataaacctcatttaatagaatgaataacatgaggagaatattatttgagagttgggaaatttggccagatatcatagctaatatttcatgtttcagaacatctttccttctttctgtccctctttcccatttgtctgttcacacagacctgaccgtgatccagaaaacatttaatatgattttctaagaatgcataaaaatgcaaaataaataaaaatgaaaatagatgtcaacttcttaaaagtacataggtgtggaaaatgtgtactttataggaaaaaaaatgattagcacagaccagtatgttaacagtgtgttaatacagataaatttttgttttctgattgtaattttatgggtttctcccaaatttttctgtagtttttagtattagaataaacttagaactagagcttaaaaaggtacattttttaaacaagtgagaaaggtgggaaagagaaaactgaaaaaggaggagcagtggtaagcacgcactttcataagtccacaaaacagaagccagaaagtagagacaggttacaacactgctttaaacttgctcgcagttctggaaaacaatcaactccggtttccacagccagttagaggagtaagctgaacaccgctgaaccaggagtcaacggtctttacttgcccttggtatttccccagtgactcagaatgttgtgggatgtcagtattccaggaaaagcaaaaagtgaggggttgagaggatgttttgagaataaataagtttggagaatggtgactctctgttcctatcttggtgactcataatgcacatgaacttggtagaattttgagaaataacagagtagaaagatacgcatatactggtttaaacaagtgtttctcaaacatacttgtaaacagaacacattctctgctgctgaacactgggcaatcctgtaccacatagtgtatatactaccatttaaaaatacatggaggtatcactggagcaaaaacaacagaaagccaacgtgtgatgcttggtcgacagagaaatctatcacggggctttgtatgggaggctaagtagacctgaagttacgtagatcacttaattggaacatgttctgttttgagtttggagcctaaacctttcatgtggtggaaatgagccagtagaggcgctgtccctaggcatgcctgaaacacaagtcagaggcacgaagcactgaattcacatttttgcttagtttctcagtctgtctccaatgtagccaacagcatctctgaaaaaatagggtacctaggttcagtgctccagaatgagaagtcaaaaatagcatgtcggaaaacctgttaacttcccccttggtatcacgcccagactccccgcttctcaagaagaccatactcatggaggctctagtctgaggcagggcagggctagtagagcagagcacagatccatacagtgatcttcctagtccatttctcccatatggatggcatttactcaagacccaacctcacagtgttggtagcaagtgacagaaagggaaggaagttagcaagaatgaagtcaaacttaatcttggacccggctcagaacaatctagtatattgtcaccatctaaatagatcttaacattgaagaaaaaacatttaaaattatattcatagcccttttagtttttcaatatttatatcttgagcaatattcaagattcccagatgtacacaggcaaaaaaagttctggtttgtggacaatcataactcatgggggaatgttgggttttctatttttatatggaattagccaaaataatttttggaattcaaatagctacagtggtaaataatatcccgagaggtatttcactactagtcagcagtgagggaaaggttgtaaggagaatataagtagtggtttatttatttttattgattactccagtcaaaattttttcaaggaagctgcagtttccattctcaaaaagaacactgccaataccacagacagaacagaaagaacgacatatggaagaatgcttgccctattaaaatacaagtgccaaacctactccacctcctagttcagtccgtttcttgcattcacttgctctattacaaaatccataagtttaaataaaacatacttgcaaaaagttgttattgaaatacaaagtcaaagtataataattttcttaaattatgagcctaattgactttttaatggaccattcacttattccttgaccctgaaagatttttattttaggcctcctgtacattgtaaattcattatgatcaacctagttcccagaagtattgcatcattagaggtacagagatggaaattaaaagcaaaactgagaagtgaactgtgccttaggcaaattaataatacaagtgaaaccattatgtaaaaatcattgtttggctggaaatatttgactaagcatcataaaagtattttggaaaatgttgatagaattctgcatggaaacatagcagtcaccttaaactgcaaggaagaaatgtttagaagatgaaaaatagtacaggattaatgaagctatctatcccctgtggcaggtatcaagatataggggaggtataatgtttctgtcgctcagattactctctaagtaaattacatatttgcctgtggatgaatctgagttcacacatttacctggtatagtctcctcctttagggagaagaaactcttctaggatagaagtttatacttctgagtcactaaatgctatggcacacacactaaggaacactatgcacccaaacccaaaaatagtgaatttactaataagtttgggaatcccaaaattgatgaggattagaaagagtcctacaaagcaaggtgaaatgattttttaaaaataaaaattgaggaggaaccagccgtcttgcttcataaatttaaaatccatattttttcccacatacattttctaccctgaaaagctacagagactcagagtaaccattctattcaagaaaaacctcagaggtattagaaggatgaatgaaaaaatacccaaacactaatctcttttaaataaaactgttgtaggatactatttttagttatttcattcattaagtattagagtaaaagcagcctagctttagaattatggtaggaatactgggcttaatcttaaagatgctgggctacagtcctagctatggacagtacttagcattataaccttcatcaaggtaccagaaactcactgaaatcccagattattcaaagtaaaacaggcatagtacctcttagctgtggctgctcagaaaatgaaatgtgatgacagagagaagctcactgtgaacctgtaaactctaataacaaaagtgtgagatggctttctcaccccctggaattataatgagaaaaattctaatcacttagaaaaacggttttcgagtgcctgcttagagtaactcttttcattcctttcattggtctttaagttctcaacatggaaatgattcaacaataggtaacaatctatccggaagacatggaaaacttaagtggaaaatgtcacaaaatgtgaagatggtaaaatagaaggagaatcaagaaataagtgtcaggtttgaaagaaaaacaacataatgaataacagcctcctgaattcttattatatttaaaatgtgatataaaacttcggagttttattttcagaagagtatttctttaaaattattataatatactaaatatccatatatcaggcaggattttaagtactttttgtgttattttaaaaaatcataaattcagtattaatgtttatttattcatctaatatgctgttctatttcctatgcaaaagatcttaactaaagcaattaaaatccactttgatgtcacaaatacatataaggtttttttttttaaatctctctttacaatatattcacccacaaccatcaatatttgggttgatacaggaaatatgaagagtaattaaatgtaaaatctttacattaaaaaagaagaaagtagaaagaaaaaaaaaaagaacctctttctaaggaggtttaatcaagtaactgaagtctacctctcctgctcctgcttcattcgtatcctctcctcttctgatgtaaaggattcctgtatttttattttacccgttttctcaatcttgtcatcttttcgatgtttgccaaacctgttaataacaaaaaattctaacttgtcaatatatacaaaatgagctttcttttgtttgtggtaatgacatatacccaatgaaatgaatgttagcttcttcaaaacagggatcaggtgtcttctgcagtcagtagtttgggtcaggactagtattttgaatcagattattttattcatttttaattagaacttcccagagaaaactcttgagggaaatgatctcaatagcagtttttcctttagcaaaacaaaaacaaacaacaagagttgtggtttatccttattaaacaattaatacatctgtaggactaagtgctgaatactttagatgctagaggaagaaagatctgcattggagtgggtttttcttaggactaaagaatgataatccacaatcatctagttaataatctttccataaacaactattctttattttcacagccaggcttattggaaacattcatcatagtttaaaaactgacaaaggccatgtttgcaaggtttaaagtacaacagatcatttacactgcactttaattaaattgaaaggtttaaggtattctcatcaaatactctcctaaatgtgataaaaagcaattgctgaatgtggcatctatgacttataaatccacatctgatcaaaaacaaacacacggaacaaacccattattgaaaaacagtccacacaagtttctgcagatgggtgctgagctctttaagaaaacactaacattattctcttctggcatccaaaatatcccagtttgatactcaaacttggtatcaattcctttccctgctctgttatttttctctataaaagaccatattgcctggaatgcatgcactctatatccataagcaatctttgtctgtaatgcactggtcaccagatgtttcaaaaaagaaatattttatagacagtcacacaactaagcattcagaaataattaaagtatattgagtatttctttctgaagaataacatcaatctggcgtactgtgacaatttcatatcgaaaaagagggtcaggcccagtggttcacgcctgtaattctagcactttgggaggctgaggctttgggaggctgaggcagaaggactgcttgagctcaggagttcaagaccagcctgggcaacatagcgagacctcgtctctactaaataccaaaacaatcagccaggtgtggtggtgtgcacctgtaatcccagctactccagaggctgaggcagaaggatggcttgagcctgggagttcgaagctgtgtgaactgtgattgcgccactgtgctccagcctgggaaaaagagggagaccttatttcaaaaaaaaaaaagaaagaaagaaacagagaggagaaaagggtcccaaagttgacataaaagagaaaaaattatttctattaatggcttggttgatagcattgatttttttattaatacaaatctgatttccaatacttgtctacatatgaattaaagtatatgtgggcatatctcatctgttgattaaagtaacactatgtttgaaaggggtctctaaatatggaaaggaaagtattcttaaaatgttaaaacagaaaaaaggtaaaacaccaccaccactactttaaaaattacatatattattatacagtaatcaaaaactgactgtaaattaactttataaagcaaatctatccttaaaattaaatttttgatcactgcagttgcaaaaaagaaaaatagaaaattctccagaactgaaatccagaatctgaccacatttcacaaggtataaaatacatgctatgcatttaaaactaataaatacaaaacattaaaaataaaagactttgcactatttttgtcaatatatcaataatgcctcagaattacacataatgatgggctttacagaatgaatgaataaatgaaaaaatattaaaaactgatacatctcaggagaagtcaacaactaaaacttcacactcattcatcagacaaaaatgtactgagcatctaccatgcagtcagggcttatttgggacacccaggctataaacagtaaacagagcacattaggtcatttcaactgccatagagcttctactgcttatactcaggtaacgaattagcatataacaacatcagactgcacagtgctaagggggaaagcaaagcagagtaaggagaccaggactgacggggagggtgatggcctctctcctaagtcgacatgtgagcagagatctgagctagagggagccagccacattggcatgagtcagcaaggcagaggagcaggcaagtgccaaggccctgagacacaggcaggctgagtgtctttgaggaatggcaagggccattcttgcctattccagtgatagggctagaatgggagagaaaaagagaaggcagcaggaaatgaagaagagcagcatcagggggcagaccacatggattttggattttactgagatgacatgaaaagccactgaaggatttggaacagaggagcagcactggtgacattttaatgaccctggatgcatgtgaagaactgcaggtgaaaaggtgaaaccagggagaacggtcaggaggctatggtgatgaaccagctggtaatggaggacagtgagagaagtgcttagtttctggacatattttcacagcagcaccaataaaatttgctgatggggaggtcatggacgttagggaaagagagtcactgatgattccagggttttagccaagcaactggaagaaaggagttaccgtccagcaagatatacagggccagggaaggaaaaggtttggaggacttgggggtgaagatatcataacggcaaaaattcaagggacagcataaggcgggatggattaatctgagtgtcagcagacagcatttaaagccagggcattcacttcatcctggaagttctgcaacactgaggcatctccaagtataagatgtacaaatcctaacttccagaaaagtataagttcaaattttaatacatcattttacttataatgaggtattccgaaggtaaaccatttgaaccatttagtgtttctgttcataaatctttcaaatgatacaatgttgccatgttgacttactgatttttaagacattgtgctggctcacattcctacatcccaaaagatagaaatacaactctgcaccataattgagaaacaccatgctgtgacaccgagaacaatctactctctatctgtaccaaaaggtacagtttagtctttaagaaatagtgtacatatgctcctttagtaatggtgaggaaagatttagattggttgattttgcaagttttaaaacagtgtagatattttcagccaaaagctaatgttgagttaattagctatgttaaaatctttgtagaaaatggtattggtcctacattgttaagaaggtttcagtttgcccacatagtctcatatatatatgaactcagtcaatcaaccttcatctttttctcttaagtacgtatgacattttttaaagagtaggttcctgattcatacctaaggattgcatattttcccactgtgtttggtattaaaatattaattagtttcctagaccaccccctaatcactggaataactattttttgtaaatgtattaccaaactgttataacgcactttccttttttaagagtatagatttggccaggtgcagtggctcatgcctgcaatcccagcattttgggaggtcgccgtggacagatcacttaaggtcaggagttcaagaccagcctggtcaacatgatgaaaccccgtctctactaacaatacaaaaattagctgggtgtggtggtacacacctgtagtctcagctactcaaggggctgaggtgtaaggactgcttgagcccaggagatggaggctgcagtgatccatgattgtgccactgcactccagcctgggtgacagagtaagaccttgtctcaaaaaaagaatacagattcaagatgaatgtatgaaaattaaagaaaccatatgtaaaacgtttataggtcagaattggacatttcttttagtaattgctttagttaataaattatgtgatttctttaaggtatactataaaatcacagcatattactttataattgggacaaaaatggatcactcacagctgtaatattctgacaaatgaaatcaactgtaaataaaaaatacactagccattctaaaatgtaaaaaagaaaaaaaagtatctatacccatattcaccctaatagccaatattactgtacttcctaatttatagttgcttaattcctgaaaaggggagggagtcattgaaaaatttcacctatacatatactcgcaaagacagtttcacagctgaaattggcaatcaacctatgaagacaatcacttaatagcaaaatgctcaaaaacctggaagatatcaattatttgtatgttatcttttaaaagccatggatgaatgtcagatgagccaccttccaagaaacagcatagctgaagaaatactgtgttaatagttgctccaggaccaaacccattctcagcacagaatcagagttttgcaatctgctctgactcacacaaacgttcaaagagaaaactttactacccagcaggtgtcaggctgaaaggtaaagtggccacctacactggtacctcaggaagaatttgctagtcatgccttaagtcatattaaaatagaagaacgaccttcttttttggagacagggtctcactctgtcacccgggctggagtgcagtggtgcaatccaatctcagctcactgcaacctcctgggctcatgccttcttcccacctcagcctcctgagtagctgggactacaggtgcatggtacctaccatgctcagctaatttttgtatttttgttggtagagatgcggtttcccatattgtccctgcgggtctttttttgaggggagggtgttgggggacataggcttgctctgttgcccaggctagagtgcagtggcgcaatctcagctcactgcaacctccgcctcccaggttcaagtgattctcctgcctcagcctcccaaggagctaggactacagtcgtgcgccaccacacctggctaatttttgcattttcagtagaggcggggtttcgccatgttggccaggctggtctcaaactcctggcctcaagggatccacccgcaccagattcccaaagtgctgggactacaggcgtgagccactgcatctggccagatcttaataataataataataataataagtagagggataaaaagaaaatacctttaaaatgttgagataaatgaaaaattgcttagttgcttagaggtagtgctgcattaggagtgaaggtacacttttaaaaatgccacactccaccagaaactccttcacagaaagatgcagtgagctaatcctgtcttattcagagcagaattgattctaacatgtcttaaatgtatggctttcttcataaaggacacagcaatgtcttcattcagctaacgtaatctcaaactaatctgctaaatgggttttacaataatgcgttacaaatgagatcactgctgtctgccagatcagccatatgtaccattacagtcaacaatgatggacaaaacctgaactggaggatgaatggggatagcaaaaagcaaacaaaatgacaacaaaggatgacaacaaattctactgtttttataatgaaataagtgtcattgaaaagtaactactggcaagtttccttgctattaaaaccatcatttgggttttcagcaaagcaacataattctctctgcagtatgaatactattgaaatattttactatttaaatagtaatatttctgctgctaccaaaattagaggtctttagaaaaaaattacacggaataataatgcatagcatcctgcgataaataaaaatacaattaattttgtaatgaatgtgtttttcctaataccatactttgaaacatgatacagtgtttttaaaaaagtcttaaaaatctgctgccatatttaaaaatagatgaacagaatatccggaaccaattatcttgtaaggtttagcaatagtctttaaaataagtttttcttcaaaacaccccactgaaatgtcacctagaaatctgttatttctcactgctaattacctaggtcttcatgtctaagaagtctttgctacaccgcatgtctatttacccaaagaaatttgtaggttatgtgatactgcttggctggggaagagaatttaaaatgaatcaaatatgagttcaatgtcagctaccagaagccacatatcctctgcaaatgcccaactcctgccctggcgtggtcaatatagtcactagttcagtattctgccttgtgtctgaccctcatttctacatatttgcactatcacatgatccattctgtccctttcttcaggaattcattttttctttctggaactttcctgatgtttttgaagaccatgtgtttgtacagccattgcataacctgtctttgaccatggccagctgtggtaatgctgtcatttgtcctaaagatccttgagagataccagctgcccaatgagctggcctcaagatcctgtacagcaaaagcacataccctgtcctgtgtcattcctgtgtctcaatccagttctctgcatagtccagagcacattattcactcaaatcaaaacaaacccatgaacttttcatatcattcctctattcctctgagtcatacatcacctaaatggtttttgatccaagtttctctgggaaacttttaattgattcttgtgctttttccacattcttggtgcagaactaacttccctcaaccaattaccctggtctctaacacaataacaaacttacttttgcttaaagtcctaataggtaattgctatagattttattcaaaggaaaaaaaatctagccatatatctttgtagattgtcctactacactcttgtccatatgcactgaagatgtatgtccacatgtttctgaaaatcaaagattaaaaatcccactgcaagctaggacaagggttcagttcagcttgtagctagtttaaaaggtcttaattggtctgaacttggatatgcctaagagaaaatgaaattccaagacctatgaagttcactttgtgtaattcctaagtgagacataattatgcacttgttgaatgttcttttgattatttaattacacttagctagaatttattgaattcttattatgtgcttttatctcattgattcccacaaccagcatgcaagacaggtgttatcatcctcatgcttaggggaaacctcagtaagcacaggggcttgaaggatttgttaggtcatatagtgagtgagtagcaaagctagaattcatacccaagacactttttaccacagccagacacctcataagctttaggaaccaaagacagtgactctgtgctctcatactgaaagtagctggttaataaatctatgtttaaatacatgagatagaactgggtgcactggctcatgcctgtaatcccaacactttgcgaggccaaggcaggaggatcacttgaagccagggattcgagaccagcttgggcaacagagcgaggctaccctctccaccatcaatcaatgagtaaatcttgcattgccggtggaaattaggtccaaaggacattgttcctgaatagaacttatctcggaaggccagggatttgaaggcaaggtcaggaactgctcctaatcattgcaaaagatcagaaaaactgcccacatacccattcacaggatcctgccaacctttctaaatgcagtgacactccaaatgtcaaaatcatctgtgctgacatatgcaaatactgtcaggcaacagcagaagcacgtcaaactgcccaaacccattcagagggtaaaataacaaggaattcactgcatgcagttatcatttgtaatgacatgctcatggattctggccacattttttgtacctcagcctccattttacaaatgggaaaaaggaaaagaaaataagtcacttctaatatgtccttcctgtacaggatcttacatattttagtgtcattttaagaaatcgctaccatgaaagagtactgatttgctcagcagtagattgtggcaatgctggatgaatcagcgaagaggaggttgattatgaaaagcagaaagctcctatttaggcaaaaaagcatcttggtaatcaacaatgatgagagaggagccttagaaagggtacgtgacaacttgatagcgcttttgtaagacaggatgctgttttaagttggtggagtttggcagaggttctctttaaaaggaaattcacaaacttgagaataattatttgattgtgtacttttcatcagtgccaatctgattagatttaaataaaataaatttgtattgcttggcatcttgggaaaaagaggtaactttattattattatttttttttttaaagaaaaagcaccttctacttaaccaagctagaacaatctttaaatgtgcaatgcaaccttaatgaataacatatccctttcaggactcccattaaatgtccttataagtgcactcctactccagcatagcctgtgttagctaatcaaggatgcactgatatgcctcgtaacctgacacttcagaagtcctagaaccatatggaacaaggaaatattaaagcaatagatgaggaattggaaataggggggacaaagggaaccgagcacaaaatcaattttgactttacaagaatcaccacaaactccacagatctaaaaatcaaacaaataaacaaaaaactgtgggactcaaatataaagatttaagagaaataaaagcaaacacagtaatccttcaaaacacaagataaatacacaaatcactgaaataatacatataatctatacttacagccattctagtaaaatgaaagaagatgagtgaaagcatatcttaattatgatgctgaagctttttggacatcaactagctgatagacaagaagacataatttctgcggcaaaatattccctctttgcaaaagatataccttggcttgatgcactttatttttttcaaattatacctacccaggtaatcaaaccacactaaccccataaccccaaatacccaaatgcaaataataatcacattatatttctgtttctcccaactaaattgacgttattataaaatatatacaaacatactatatatatactttaaatatagtaaaagcacagaattctgatttttctaaatgcttaatttggcattgaaatcggtcatgtccacttaaaatgatttggagagtgtctttcacacaactacttctgtggatcctttctttatgactatattcctaattcttgtgctgttcattttaatgcattattgtttcataatacaatactacaaattgcaaattacatttggctcaaggagtgattatgaaaaatactatcactgctgcctttgctcaaataactctgataataatgagagattgattgagctttaagcagctcaagtgatgagaagggtcaatttgaacatttctattaagcttcttttgttaaacccaacactttgccaggtcagaggcaaataatcataccctacatctggttaccatggttttccttttcctaaagcaagggaacaatttagtaagtggtactgccctgaaggcagtccccataagaaatgctaatgagacctaagtcacaaaaacacatccatttaaaagggcacttgaaggaagaaaaaggaaaaggtggaatgatatttcactacacacctttctctaggacaaacaacaggaggtattcagtaacaaagataataattcgggttgccatctgcctacttaatcaaatggctatccaggttgtaaatgcttatgaggtagtacaaacacacgcacaaggtaaggatatctttgtttgagttataaacatccaccctcaattaaatatgcattgtgattcaaattctatgtttcaactactgacaggaagtgatacacatacatacgttacagcaacggaaacaccttcaaatattttcttacccttgtatgttcatagagcagacgaaagtcacaaagacagacaaataatgtgatcattaaagttttgggattggtggtggggaagccccaggctctttgcatagcttctggaaactttgaaagattaaagcttccctaaagatctcattatctgtaaagttaaggtgaccgtcagcacttttttctgttgattataggaaacaattccttttgattcacatttcttagcgaatgctctctacagagtaaattaagaggtgcagattttctttttatttatctttaagttaattcgcatattcagattctacattagggagctgacatgtttttaaggcccaataaagggctctgtggaaaaactgctaagaattggaaactaaacctaattcttagaacaggaaagaaaagattcccacagagggagcaggttcaagtcaagaggcaaacacccgccatctacctgtgtcacaatgcccttttgaagaaaaagggactagaggtcacatatttgcttaaagtcaccatctgtgcagcatgcctgtatcctggagagtttaacacacagagaaagctgggcatggtagatcacgcctgcaatactagcactttgggagacaggggtgggaggatcccttaggacaggagttcaagaccagcatgggcaacatagtgacaccccacctccacaaaaactcaaaaattaaaaaacacatacagaaaatgatggcgagccaccaaaaaaaatgtcaatggctctcttccagaaaagatccttcactctttgtgctgtggtttctctctaccaggatgtacagcactaaatattatttacgactcaactgtggttaagaaaccatctgaaatcctggggtgggtgaagcagcaaggggtcagaacacggagatgtgttgtctcatctccagtctgaatgctgctcatgtaaaagggacaagaaattcggcaaatgtcaaacctccacattcttccttatttgaccaaatagttcaacaagcgtccaaatatacaacttgttgatttgtgcactggcctggaattcctctcatcccatttccatcttctcagaactgtcacgtctgcactgcctgctgtgtggtctcagtccctagacaggctcactggccatcacaagcaagggtaaagttctgggggaagcagatcctgtttatccaagacggaatcctggaactgaaggcaatgcttcatcattgccttcagtctcattttctgagtctcctccagtcagagctgcttttgcaggatatcattatgttgcttttccctggctgcaggtggaaactatcttgtctaaactagtgtgtatactcatgacgtattagcaaaactcacttcactggggacagtatatacacaaatctcagtgggtagaaataacctatatatctttttttagcaaaggagttcagagactctattgaggaaataattcaggcataattaagttaagggtagaaaaccctgtgaagaggaacttagtgaacaacatgagcagacagatgtaccctgccttaaaatttcaaaagccttccatacccattctttcatttagttcttaaaattaaatgtgaagaacgcggaaagaaggaaaactgaggctgatatgtttaaatgccagaggcagtggggcaggatggggctgagctagctgggttgggcagggaaggctagaaagtctaaatcccaaattctctctactacagtatacttatctctctctgatttacctccactgctttcaatgactaggttcttcatttagatttacacattaagagttcatgaagtaaactatattatattttaaaataagttattgatggcccaactattagcctttgcacaaagaacatgttggactagagacagggtcttgctctgttgcccaggctggagtgcagtggtgcaatcatagctcactgcagcatcaaactcctgggttcaagaattctgccgcctcagcctcctgagtagctgggactataggcacgtaccaccacacccagttaatttttaagttttttgtagagacaaggtcttgctatgttgcccaggctggtctcaaactcctgagctcaagcaatccctgtctcggcctcccaaagtgcttggattaaaagcatgagctcatacctgaccaactcattatttattatactaaaattatattaaaatgaactttataaagatcactatgtaagaatctttaactagactataaaatacgtggatgtgggaaatgtaatttggactcttaaacgtctaccaaaatgcatgatgtgattatttctcaatacagagtaacaatcagtacatgctgatggtggatgggcttgaaagtatcagatataaaagtatcaaagcattccatctaagtcccagaagacaagatctaacatgctagaacaagaatactttgggggataatttcaaagtaatcacaagagagttaggcaccatggcatgttcctataatcccagattcttgggaggctgaggtcaaatgagtttgagaacagcctgggcaaagagcaaaaccatctcttaaaaaccaaccaaccaactgaccaacaaacaagacccacaagactaaaaagacacctaggtcactacaaccaacattaaaacaccatgataaacagcctcactcagcctgggtgttgtggctcacaactggaattccagcacttaggactgcttgagcccagaagttcaagaccagcctgacaacacagtgagaccacgtctctagaaaatatgcaaaaattagccgggtacggtggcgcacgcctgtcgtcctagctactcgggaggcttaggtgggaagattgcttgagcccaagagtttgaggctgtgatgagttatgatcacaccactgcacttcagtctcagtgacaaagcaagaccctgtctctaaaaaaataagtaagtaaataaataagagcttaactctaaaatcaaaaagacttggggtatttgatgtgtgataactggcactattaaattataataaaactactgtataaaaaatagtaatagcaaagataaaatgcaatcattttttaaaacacgtagcacactgctggcagaaatcatcactgaatatgtaacagacactatttcctaacaagaatatctaaacattcatctcctcctccatttccaggtagctactctagtctacctcagtttggaagcccacgaccatttcagtggtagcattttccatcatttgtggtctgttgtgggtctttttggttaaatgaaaatgatctggccagtgatggttagtcttggccagcacaataaagtaagggtggacagcagcccagagttacaaagcagctgcactttcagaggcccgaggccacctggcttcagagcagtgagctagagaggcaggtgctgcaagctgctcacccaacatccattctcttctttctccttactagtaaaaccctgatgtggctgggagaggaaatgtacctattcgggatttaaactacattccccagcttcccttgaaaacaggagctgaagataaaagacagtagttaagagcatggcctctggagccagaatcctgggttcaaagtccagctctgcctcttcctagcattatgctgttaactggctgtgaagggcaactcatttaacctctttaaacctcaatttcctctttggtaaaatgtaaccatcctcacagatttattgtgaagatgaaatgaattattcagccctgtgtgttggcacataaaaacactaaataaatatgagctattttattatcattgttatccttaatttctggttcacagaaactgatgagtggcacttctggaaaagatccagagaaagaagctgacttagctagagttgtaactctgagagttgtgacactgaggatagaaacacatgttaagacactcgcgttcacagcagccttattacaaccgctagcgtgcatcgacgtgggaatggataaacaaaatgacgtatatacatacaataaaatactactcagcttcaaaaggaaggaaatcctgacacacactacaacacggatgagccttgaggacattatactaagtgaaatcaatcaatggcaagaagataaataccgattcggcttatatgaggtagctcaagtagtcaaactcatagagacagaaagtaaagtggtggtttccagggacgggggaagagggaactggggagatagcggctgatgggtacagagtttcgcaagacgaaaggcgttctagaaactaatggtggcggtgaagtgcacaacaacgtgagcacacttactgctgctgaactaaacggcttaaaaatggctacagtggtaaatattaggtatatttcaccacgatttaaaatgataacaacaataaaatacagattaaggatggttgaataaaaaggaggtggtgatgctgacaacactctgaggcgaccatatgatctttggacttccaatccccagacttaatgagagaaaataaaactctggcttgtttaagccacaagtatttgagtctgtgctacaaccaagacaatttcttacagatcaaggcatggagataagcaagcaaggagtgtctgctttcatctatttggcttcccagtgagagaaaataatacatcctttgtaacatctttggaaatgctcccatcttcagatcaatacctaacttgttcagtcttatagtccccaacaactgattttgtcaggatggcaccctcaaagccaacccacagtggccaacagagtgcgaggaggagcccagtgcctcccaaaaggctaagagcagaactaattgagacaactgcaaataaacaccaatagatattcaggccaaggctgctattccagctgacaaagactgtcagtactgaagacaaaaggaaaacaacaatccatgagtcagaactgattttcattttctcttcattgtttctgatgctatttgggtactctccagttggtgatggcttcatgcactttctattatgttggctgttaataagagctttctctctaatcagacggctgtccaccagctgtatgtatagacaacggtggaagacacttctaaagggagaggtcttttccctttgctgaccagactaaatggaaactggataaaaatgttgcttttatgactcagagaatgtctgtcttacaagataaataatgcttaaagaaattctgtcagatagacaggagtgtagccaaagagtaaagcatagaactttgagaataaaagataataagacctgcatggataaaactaatttgaatgtgggaccttctgaaaaaggagttccacaggaaaaatgctatataaatttttctgtttgttcattaaaattaagaaagataaaatcttagtggtaacccatttaaagactgtaatggtatctaactattaccaaaattaccaaacaatagctaactggttacatggtctacctttttaaaaataataattagttcataatactttattactgaaaatataaaagaaaatcaaaattgtgtcacagtaggaaaaacatataagtctacactttcctgggaaatacactttcagaaataattccagttaaaatgtttccgaatgcaataaccggagagtacatcatacacagagtgactcacgaaattaaaaatgcatgtacaaataaaaagttcacattaatagtttgaacataccaaggactttatgtctctttggatagacatgaaagatggacactgttgccctgaaaaacaaagatatccacaaatcatagtatattacaatttttttggaagtcatgggaatagaagcattcacgaatcttggaaaaaacaaaccctgggaaaacacagtctggaaatgtatgtgagtacatagtgggggctcctgattatgtgttataatggttaaatgtcacaatattggaaaagaaaagcttcctaaaaaggtaattttggccaggcatggtagctgacacctgtaatcccaacactctgggaggcagagatgggaggatcacttaaggtcaggagttcaagaccaccctggataacaaagtgagaaaccatctctacaaataaatgaatgaatgaatgaatgtgcatgcctgtggtcccagctacatgggaggctgaggcaggaggctgcagtgagccatgcttgctctactgcactctagcctgtccgacctgggtgacagagcaagatcttgtttaaaaaaaaaaaaaaatggcagggctgggggcaattttaaagcttggactttgacaaaacaatttactgactataagtacttttcttgttctgtaagcatgagagaagactggaactaggcagctaatttagagtagctaatgccacgaagatccttaacccacagatagctctaggaaggtcgtgttcagcaggacaactcccaacatacaagagaaaggcagagacagtgaatgacagtctctcaccatggagggtaagaagtgatcctacaggcagcaaaatcaatcaccaaatttatttttcctgcaacttttgttaagtacttacaaattaattccttatatcctaatagctacaatcctttgtgagaatctgcaattaggattcacttaatgtcacctaaaaggtcatttctattgctcaaaaactatggaaatctggcacaggttttgcgcttgtgtttgtatcacagtgccacgaaaaaagctctgcttcttaaaacagggatatgcgatgttctcaacttgaacaagcattagcatcagagatgctagccacacctgcatcatatagaaatattcaagtatatcacagagtgctgggtaacccttcaaaataggtccagttgacacctactgactaatcactccatgtagccaagaccaggaggactttctgacctctcagcaggaacaatgttgaccacatcattctaattaattaaaaacacatccttgctttaatggctttagtgactgcactcttttggttttcctcctctctctgcagtggcctcttctcagttaccaacagctccttcctctgccccattcctgccctgagcgccagtgatattcaaaggggccttagaactctctctggccaccttctattactccttccctctatacgcacttcccagaccatctgttcactcacactgccatggttgcaagcaccacctgacatgtctttgatttccaaatctctacagtgccagcccttccccctcttccaccctccagttccctccaggtagacatatcacaggcttatgagatgcaacatgtcacatgtcctccaaataggatcctcttccagtatttactagccggtgtgtgactatccacccagctgaccaggctaaaactgtggcaattctttcttattgttctttctcctttcttttttttttttttttttttaacatcaaatcaaataagcaagtcccctagagtctacctgagaaatacatctatatgtctctgtccctacggctacctccatcactggccacaatttttacaaaagctgcctcacagttcctgacatcactctggtctagcccttcagttcactctacacactgtggttagaggaatcttttaattttctaaacactgtaaactttatcaagctattctcttgaatggctacccactatctttaggagcagagtcaagccatatcgagtcatttatgagaggccacctgcctctccaatgcctccaggttcctcatcccaccctcgcaaaccgagaggatttccaccatctaaatggtgtttttcaaattttgttttggaactcactgaagacctgaaattgatttagtggcacttacttaccatttaaaaaaaatgaattgcagaatattagtatcaacagcagcagctaatacccacaaagtacttactttgtaccaggaggagttctaaaatgctttgtatctattaattcccattagcttcaaaacaaccctgtgaggcaggtaccattattatccacacttcacaactgaaaaaagtaaaacacaaagaggttaattaactggccccacacacaaggctggtgagcatacagctgggatttgaactcaggacatctaaatttagagtttaggttcttagccactaccctatgctgctgctcaataaatacatcacactccatcacactgagaagggcaggtatcacttgttctgtgaaatgtttactttagctatctgtgcccatacctgtacacgaggttgcaaggtaggatgtatttcttcttacagatgatatcaaaaaaggttaaatcccactgctgcaaaacactcctttttcccctttgagttcagagaaagaagtcaaaacctctttcagacctgttttaatgtcatttttcagaagaaggcagatggcttctagtctgcgctaggcccatttgtggcaagttcccacaatgtccccatctccctttcacgaggccctggagcaggacctacttactcagtgactgccacgtctcctgtatccaccactaaatccccaacacctctaacactgccaaggatgtagtaggcactccagtaaatatttgttgaatgtatgaaacaaatggttttacctctcaattactaaaatcatcacacctgctccaaaaccaagttttaaaaaaaaaaaaaatccacctgcccatcattagaaaccatttttgccaggtgaaaaataaaaccctcagaatttattttactgcccaggtgaattttttttttttttttttttgtgcaaggcaggtaaaactttatgtgaatgtgttctgcctaagtgattatcaatgctttgccactgtgctcaaagtaacatcaggcaactggctattgctacggcctagaaagaacatcgaaggaaaatttccatcctgttagagtacctacttgcagttgatctaaactttactttctcaaaattgttccagaatcaagatatcctgagataaattaaacagatgtcatcactttctcaattaagaaaatgattttatttttgacactgagcttaagacctccattccaaaaaaaaaaggaaaatatttttactactataaaaggagataaaatttttaaaaaggaaagaaatctgaaattctaggaatagaaaagctcaacttgggatgttttcctaatagctaaaatcagctataagagcaggaattcgataagatgtttttttttttcctctacaatcttcagttagtggaaatttacaaaggtcaggtttgaggatcccagacagatgtgagacaggtgatgctgagcttgaatagcctcccaaggagcaaagccctgagaggtgagccagtgtacccaccaaggatcaggcaattgtgagctgggcggcactgacagggcatgggctgaggtggagaggaagacaaggagacagaggaatgagcagaggatgcaaaaactgctaacacagtctgcggaaaagacctcataattgttttgatagggaaaaatcagaggcagcaatggtggagcaagatagaggtacaaggtggcatgcagtaaggaaaggggaaaatgagggtgggaacaggaagaggcagggaatgcgcagcacagagccacctagaaggaagagagccggaggaaagagggcattgttttaaaatcgtcctcgtttgtgttctggagcagggatggctgccatcgcacctacacagacaggtctgagagtctgtgaagagggagaggaatgagacagctggtaagtttttcattagcagtaaaaatccttaagaattattttggtgccaggcattgtgttccatgcctgtaatcccagcactttgggaggccgaggtgggagaatcactcgaagccaggagtttgagaccagccagggcaacaaagtgagtccccatctctacaaaattaaaaaaaaaaaaaagaattattttgggaagagaagagaccatagacagagaaagctatagaaatcaagtaggaataaaacgtgaaagtcaggttcaaaaaatactaacttctgcatttccaagctagtaacatgtgagtgcttttttccatagcactcacaatagcaatgccatgtcgcatagcaatcttggctcccacataggttttaggggtggcaaaacctacccggaagggtaagacggctcagatggtgcaggagagtgttaggaacacggcctttgaggttgaccattgttcaaattcggtgtgactctaccaccaattaccttgtgaccttggtaagttcttctccacacctttatgttttagtttcttcattcataaaacagggctaaaattagtaccttatagggttattatgaggtgtaaaggggttattgaaaacaatgttctctgcagtgtccaccagtatcaacatgcaatgaatgaatgctgactgctagccacagtattggctacatgagaaatagcttattgtttgccttaaaaagtcagaatgaccaacataccacctgacaaaatcagaaatggaataaaaactgataatagatcatcctctaaattagccaggagagtggaaattgagaaaccttaatatagcaagttagaaaaattttgtagttggtttccatcactttaaagtatctgttcagttcatttcaaagtatctgttcctttgtatgagcagagactgtaaagttcttcatttcctttttttaaaaaaagactaacattgttagataatattgtcattataaaagaaatggaaggcacaatataaatattataaatgtcatgggagaagaaactaagaaggtgaggttgtcatcagcctgtcaaggcatacctcagattccaggccccaggtatgggctgggccctggtgcctcttgagaaatgtgtggatacctagcagcggtagtgaaagggaaaccccagagcgcctccagtgggcgaggcagaggttgtctgtaagtggcccatggctggggccttcagaagggaggccttccacctgctcatttgctctgcagcagctgcccacaaagcttgtaaggagtaaaaccagttttgacttctttagaaacagaatcttacacaactcctagactctgacgttttcaggcgtaggcagacatgaaagggcaattttaacacgaactctttgcttaaatctatcaccactcaactatacaatcctcagcctgaaaacagggaatttcccaacatggaatgtttaatctggtaatcataattatcttttctgacagtcttatgtagagaatacttaaatcatggctgggcacagtggtgcacgcctgcaatcctagtagactgggaggccaggcaggaggatcacttgaggccaagagtttgaaaataccctgggcaataaagtgagaccgtgtctttacaaaaagtaaaaaatttaaaaaaatagctgggcatggtgacatgcacctatagtcccagctactcaggagactgaggcaggagaatcacccaggagttcaaggttgcaaggatcatgttactgcactccatccagcctgggtgacagagcaagatcctgtctctaaaaaaatttttttattaaaaaaattcaaaattaagctgggcacggtagctcacgcctgtaatcccagcactttgagaggcacaggtgggcggatcatttgaggtccagagttggagaccagcatggcatacatagtgaaaccccatctctacgaaattaggtgggtgtggtggctcatgcctgtaatcgcagctacttgggaggctgagggaaaactgactgaacccaggaggcagaggttgcagtgggctgagatcgcgccagtgcactccagcctgggcgacagagcaagaatgtctcaaaaaaaaaaaatcaaaattaatgttttttaatttacaaaaatcatctatggctatttttagcagaataaaagaacttcaataataaaccgggccaggcgtggcagctcacgcctgtaatcctagcactttgggaggccaaggcagggggatcacaaggtcaggagtttgagaccagcctgaccaacatggtgaaaccccatctctactaaaattacaaaattagccaggtgtggtggtgcatgcctgtaatcccagctactcgggaggctgaggcaggagaatcgcttgaacctgggaggcggaggttgcagtgagctgaaatcgtgccgtcgcactccagcctgggcaacaagagcaaaactccatctcaaaataataataacaataattcaaataccatgacgtagatccatggagcatgaaaggctgctctttggggactgtgtgtgcagtcacaggtatgtacgtatacaaaggcagagacggcagtgacattgccttccaaagatgggaacgccagcattgtcctggtatgaagacttgtcataaattgcaaaattacccccaacagaagtttccagcatacactattcaccgctgattccaaaagtattttttttttttgagacggagtctcgttctgtcccccacactggagtgcagtgacgccatcttggctcactgcaagctccgcctcctgggttcacaccattctcctgcctcagcctcccaagtagctgggactacaggcacccgccaccacgcccggctaattttttttttgtatctttagtagagacggggtttcaccatgttagccaggatggtctcgatctcctgaactcgtgatccgcccacctcggcctcccaaagtgctgggattacaggcgtgagccaccgcacccggctcaaaagttttatttattcattcactcaacactgttttagtctggatttaatcacaagcagaccctgggacaaggattcaggacagtggtttaagggaagaaacacttgggagagaagtggagatgccacagtggggaggaaaggctgtcacaaagggatgttaccgagcctgtgaaactgtgggtatggggaacacaaccccacaggcaaactctgggagcagggtaggggctgctgcctctcgacctgaaatgcacacaggaatccccagggttgttaagctgcacattctaatgtcagcagatgtgggcagggcctgggattccacatttccaacaagctcctggtctgagggtgaagagtgcagaccttatgacttagtgctataaacccaagggccatggagactggggtacatttacactggcgttgaaggctgctccaaggtgttattcctgggcacatccagcaggcacagatggaaacacagagctgccttccaagacttcagagaggcctcagacacagaggcagagaatggccactgaaggggtttggcaatgggcatctgttacacttactgggcactgatgatggacgcatcatgcagtctgccagggatacagcaggggaaaaatgggttaacattctctgtcaatgtcaatgtatatttacatcaaatgagtgggatctatcatagctcaggtaggagtgcaaatgtgaaaaatgatgccaaaaagtgggttagaaaagtgtcagggtgagagggagcagagtttgcaattttggctagaccctctaaaaagctgactcttgaataaagatgttaaaggtacaagagtgaacctaggaatacctgagaaaaggctattccaggtagaggcaggatcaagggaaaaggctctagtggacccggtaggttcagggaagagtaaagttactgaaggaaagagcggtagggacaaggtcaaagaggctggggtgggggaccaagttctgtagggccctaaggatttggtttttgctctgagtggtgccgaaggctactgggggttgaacagaggagggaaaagtgacttctggatgtggtggtgagaataaactgcaggaagcaggggttgaggcagggagcacagtgagagggctactgcctaagccaggaagagggcacacagagcttggaccactggggcacagtaacagcggcactgggggctgaaaagtaggattgcagatgtgtaccaaaaacagagctaatggacttttgcttttatacattcttaaactgcttgtggggcataagggaaaatcaggtgtcaaggatcactccaaagctttggatctaaccaactgagaagacagaactgccattatctgagaaagggaaggctcgcgggagcagtttgcggggagggggaatccagcagtgagttgggagcgtgtgaagtttcaagtgtctggttgatctccaagtgaatgtgtcaagaagatggttaaactacaaatgaagagttccaagaaaatgtccaggcaggagaggtgaatttgagagtcatctgcctataggctgtatttggatcacaaaggctgtttcctgagaatatcaaaattctgtgttaccaaaaagagaaaacaaaaggacttcggactgagcacctggggcacaagacctggaggacagagtatggcacagaattagcaaaggagacaagacagggtaggccagggaggaggagggaaagctggcaaagttggtctcaaaggagagccatgattaacatgctgggtactgccagtggaccacgatgagggatgaaaatggaccccgacttcccaaggaagaggaactggtgacctggacgagaacaggatttgctgagtggaaggggtgaaggattcattgaagcaagttcaagagagaatcggaaaaaagagacagcaaatatatcaaagggtctgctgtggtgggcaagaggacatgagatcgtagttggagagtaagtagggctaagagagaattttctctaagatggaggaggtaacagcatggtgcaaaacaatgtgaatgatcctgtagagagaagagcaatgccaggggcagtggctcatgcctcatctcagcatgctgggaggcagaggccagaggattgcttgaggccagaagtttgagaccaacctggtcaacaaagtgagatcccacctctatataaaatttaaaaagtagtaggcacagtggtgcacgcctgtagtcccagctactgggaaggctgaggtgggagcatcacttgagcccagcagttcaaggtgcagtgaggcatgattgcaccactgtactcctgctgagcaagaccctgtctccaaaaaaaaaaaaaaaaaaaaaaaaaaaaaaaaaggcagacacagatggatcagatggatttagaagagagaagaaataattaaacattgttggggcaatgtcctgcaagagggaagagaggaccagaatggttttttgggagcttggccttggcttacagcatgggatggaggtgggggcagaggttcaaccatctcccccacccccccgcccccccaagaagaaaagagtagtcatggatgatgcagaaagaattatgaattgcttgcaggaggcaagagaggaccagaatggtttggctcttggcttaaagcatgagatgcaagtggggaaaaggatcaaccatccaaaaaaaaaaaaaaaaaactgcaagcagagaggttaataggagacctggttatttcactatgatccaaaatttaatctgattttagtcttttgcttctaaattggctattattaaacataggtcagaagaaaaccattcaacgctcaattaggaaagagatcccccagtgaattctttaaaagattgtcaggacaaaacaattacctttatatactaatttgtggcttgatacaagtacatttaggagtaacatgtacttgatctattatatttaatgtaaacaatatggaaccttaatggtaacaagtaaaagcattcacaaggaatatttccaacatatgttgtggtgaatatcattagctgagcttgtcttctaagtgcatttttcaatggtgcgatagtatttatttaccctgtgttattagaaagtgaatagtcagtagccttcaattttcacatcaattgcagaaaaaagattccattttccacacagcctggaattgaaattgacttagcatctcagaactgtcaagaatttcttttgcgaaaaggtttgctttagagagactatcaagtaggtgtcatccttgacacctgcattctatattcatgccacaggtctatggaaaagaaacattaaagaatgtcagaaaaggtctgagagaggcccagccgtcatgctttgtgcctcctcagcttcctctgcattcagcctgggcgctgtggatgtcagaggttctctatttaaaactgctaaccaggaaaagaagaatacttgaagaatatgatatcagctaccttagaacttgtctttgctagcaggtcagttggacatttattttcctgtgttaaaaatgggaacctctgtttcaattcaaattaatagaagcatacattaagtccttaggatttacaaattcagaactcactccaaggaaacctcccagggtgtataatcacaaaacagagctgttctttgtccaggtgacaaacaagaaagcaaataaaattatgtaaaatctcactgtgtttcatttggagaagcattgttttctatgtgcttactttaactgtattccttaaatcatcagcagattgcacaggatgccacttgatgtaccaatgtgaaactggtcacattaatccccatggcaattaggtccaagtcataaaaaactagcatgacaaataaacactcttctgtgtgtctccttactagaactgagggctttcacttgggcgggggcgagggtagaactgcaaactgctttcaagtcagagcagaggtcaagccttctcacaggcactcaacccaatccacaataccctttatcagatggttttcaagacttcagttatttatttttttttatttattttttttaatagagacagggccttactgtgtggcccaggctcgtctcgaactcctgtgcctggaattacaggtgtgagccaatgaacccaacccatgtttattttcagtaagaatgcaatgctaacattttcaggaaaaagagttaattaaatatacagtctctgtctcaaatcctgggaagccatgaataatgaaactgtgaattaaggcttcttacaagagagaaggcttcaaaccacagtaaggaccattggagatccacctgcactagcattggatctgtgattcgaacacttggccgggcagactctttccagaaacatttatgaaagagtgtgtgctctctcgacacgtggtctcagcaaaccttgggattactatatgccaaagtagctctgcttttttcacacgggaagaacctgctggttcagccatctaagcacagaaatttattttcctacaccaccacccccctgccaaccacccatttttggtctaaactctgtaatccacaaagggactgaaacctttgccaaaaaggccctttcaaactggtccatctggtcatgaatctatccgttgcatctcatccctgatgggtgactgtaccagcccacacacctctttgcctctgccctgaatcacctgtaacatctgcctgtgtcccaaagtcactggtggttacacaacacaaccaaatgggtggtggccctttacagaatcttgaaaactctgattctaatatccaatgggtgtgtgctgatgatttctgaatacgccagcagtgagaggactatggttttccactatgaaaaggggccaataaagaaaggaaagagaaaaaaacacgtctctgccttttcaagcgtaatttaaaccccaagcttgaaatcaagatccaaaagttccaaatggattaataaggaaattactaaaccatcaaactgctgatgtcgtaaacaaaattcgtcaacagccactaagaattcattaaaagtaaatttattgtttgtttaaaaaaaacaacaactgtgcaatatgtgctgttcaagacatgttttgaatcgctttgttgttcatctcttctcgggcttcagtttggcaaggctaaatgagagacacggtacagacacacagttagtacaggtgaggaaagcaacaagaatctgtgtttgttcttttctcaaatgcctaagatgtataatccaaactacgacattcagtttttaaaacctgattatgttcattgtgttctgaaaatgatcatattctaaaaaggaaaagagagcaataaatctgatttcagccaaacaaggttacaaactaaattatctatttcctcttcaaaactgaataaaacaatgcttcggggacccaggtaatcattttaaatgtaattggaggattcaattttaatggtaatattgcaacatttcttttgctttagctttctgcagtgataggttctcagctatcacatatggacaacagctagaaataaatctgagacatgtacaataaggtcacgtctaagaaccttcagttttagagtacatacaattctatgatattcaaacgataacagttccaattttgcagcaaagcaatatcaaattacacttactctagggctcacaaaaagcgagcacatgattttaacttcttaatatctgacaatacagtattttattatcttgctggttatttcaatttggagattaaaaactaaggcaaaaccatgttgcttaagaaggctgctttcctttaaaaacgaacacatttaaaacattaaaaaacatatctccctcctcctaaagtacatactcaatttcctctttcgtgacaatttcatacaattgaagaattctcagaaatatcctccagtattaaatttgaatagccgagtgtctgagaatcaaacatacacagactcaaactttgtgctccccgctttgctctgcaatctgcacacagaatgattacatttacaagtcatgtttacctgttttgtaagcacactcaggtttcttagatacaaagccattttaattaaggtgatagaagctccttgtgtgcaaaagatgtagtatgtatgaggagaaattaatacaaacaggaaaaactttgcatttgttatttgattccttatagatttaaatttctgatttaagacttgcattaaggcggcttttgtagttcatatactccataatttataaacagaagagtgattcatatgactcacattctttcctagagctgtttattaataattaaatcatctttgtgactaccattcaatgtgtcaaacagaaaaccatgctgtctgtatatgccaatgactaaaaatatctactcaaggtaccatcatttcctctggtagagtttttaaaacaaggcctatctatttgaccctcatcatatttaaccaaatatcacagacaacctgttggggtaggaatagtgtatgagtgggagttgcagggaggcaacaggatgatgggggtaggacaggatggtagagggaggagagcctgtgagcctgtttttaaaggaaaacatattacttcctcaggcagactaaagagaacaagctcatgtgctgctatatttacctacaaaactagactcccactactgaatgtcccttagccttttgttttctgagctacaagatagaaagaaaaggatcacacacacagacacacccctactttatacttcaggcctgcacggtcctccatacttgaaccctcttgcaaaccgtactaagaaatatatgtgcacatgcatgttctgattaagctgtttaaaagcagcactgctaaggaaaccacatcctagttttcttaaaagaacaaagagaaaggaagagaccaatttttaaatcttactgtagtcccctatgttgttaggagaaaaaaaaaaaagaaggaaacgtaaaagaatcaacctgagggtatattcatctcaaacaatcagatccagaaggtatggaaggaaggtagtttaaaagaatgttttgaaaaatctaacaatgctttaacagtcttctcaaagactaatgactatcctcatcgtgtgaaggaaggatcaagagccaacattcaataacaaaaaagcttatttcgtgtttaatatattattctgaactcatattcaaggggcaatatgtggcaacccattgggaaagggctggcgcagtggtttgcaatctgatagaacccagccatgcccaggggcactagacaagatgctgccactctggtcaaaggtatttatgttcaccgtggggtgctatgttgctctgctgggagaagaactctgttttgtggaattccatagacttcctggtgtaaacactgccaccatggcaaattttcagctaccagcatgatgtcactaaacacggggccgggaaaagctgcacagtcgtcattatatagtattagccctatgtccatgccataaatgtaaataatttcaaaagcagagatcatagtaaagtatagcaaaaataattaggaagtgatgcatttcaagtattaattacctttgctttttagataatgtatttaatttttaataatggctgtgtttgacaaccagcttgcaaagtttctaaaaattgatcaattggctctcaccagccaaggtgggctgattccaataaaccaatgattccacatacctaaaaaagtatgaatgtctgttattttcttaacagtcattcttaaacactgggagaatatcagcctaatttttagggggaaaaaaaaaccttcagcccctgcacctgcatatagaattttatttccaagaatatgcagggtcaacttctttatcataaagctggctttcattataggttatgggtacaggctgtagataatgatctagagaaagcatcatgtaatgcttgataggactcctagaaaaaagagagttgtgtggtggtgttcttcaaggtcccttagaaacaatacacatttctcccacactctgctcctctggccccagatagaaagctctaccataggcctttctttcttctggagttgcaggttacagaaaaagatcacttataattaatggaattctaagatattagaagtatattttttactccaagaccagaacagagcacttaaacagataaatgttggccaatgaatgaaaactaacaagccgttagagctttcagtaagacgtcaggagagcccctggaagagagagtgggctacaagtctcaggggaaggtttctcccatctctaaccctgtaatttgaagaagacagtagtacagattccttccatgttaactgatgggcagcagccttatttctgtgcactgtggaggtgccagtttatgagctgtcagtctgcacatatggaacaaaaaggcccttggctaacacagaaattgaaataaagtggcagttagagcaatttcttcctatatgattcttgaacacagagtataatgaagaaacatgatgagggggccctgtgtaaactagaaaaactctaatgaaaaactatgaaaatcccacagttctgaagcactgagagacagaaatctaatcacattgaaagaaaatactgctcataggccaggctttgtgttaatataagtctagagttaactctccttcttctatgcacttaatcagacatctacagaacacatctgttgagctgtgtagccttcaggctgggccatggttcctcgactttccaggtctgacttatctatacctccctgagttatggaggtcaatttcaggattgtaaatcaactaattctatgaaaatgaaaactgttgttcacattttgcaatttaaaaaaaagtttttaaaaagaggggatccataatgcaggataactactttttgaaaagtcaaatggctgtgctgtatgttttcaattttaaaccatcaccttgatatgtttaggggtttaatttatggaacaatcaagcaatctttatatttaacattaagtgcctgaatattataaatcatcttagatgaacttttatgggagagtttcagtgcaacttctgaacaacttgtcacttttattgtatggcaatgatttgtaaaaaatgatatgctaagtaatcctagagtataatttatgggcacaaaaacaactgtcaagaaacagccagagaccacatttaatgaaatctttacagaccgaagtaataagtactaaattaatgaacgcagcttaattgaagctctatttgtaactttttttattagacttgttattaatgaacctttaaatgctaccactaacttgagctctatgtttaaatttaaataatgaaccattgttcacacacaaaaaagaacaaacactgctttaatagccctttgtctcaatggggctttcactcttatgcataactaagatacagacatgtccctcctacctctcaacaattatttacatggttggcaagatataatcatttaggctgctaaaatagtctgaaaatagctaacatgaaatccataacaaagtaaaaatgaggtaggaaaagattatacaagaattttggttgatctcaaagataatgttttcaaatctgtgctttcagtgcttttatttatttatttatttattttagagagagaatggaatgatctgttgcccaggctggatttggaatcctgggctccagcattcctcccagttcagcctcccaagtagctgggattacaggtgtgcactaccgtgtccagtttttagtactttttgctaagctcacactcctgtatgtttaaggagattctggtttgggatggtaacgacttacctgaacatgtctcccaagcccttcagcattcccttcttggctttcattttatccttctccttatctctatctttcttcttttcttttccagttttatccttttttctatcagtcttatcacctttctcttggtttccattcatttgtctctccagagagtgggaaggctgatcactggctgtggatacagactctctccctgatcttgaactttcttctgtgtcttcttccacttggaaggaaagaaaaaaaaatagggacacagtgaaccaacgcaacaaaaataataaagctaaaatacattcaaggactttactttcccacacttttactgcagtatggccctgctagcaacatggactgcaatgctgtttaactttgagtagaattaaaatggaacatgtgatgtggatgcctcctacgtgaagatcgtgtgccaagtcagtagcagcaaaacagcagcttcctggtgggatgctgatgcacccacagaaacaccctctaagaatcagattgtacactactaggggggtgccagcaagaccttgttatacagcgcagacctctaagggtcccgtgtactatatttgcaagatgaaaagaaagaaaataagcaggccttcccaaagtgcttcctttcttcttgggtaagaataatgcagatacactctggcccctcattaatttgctggactacaccattcaatgtcagcacaaggacttctttccttaggctcccaacatatcctgctcacacagaagagcagattattttggcttatatctacaacagatctgcacagcctctgtaactcttctttgcataaggccaacatcagaagtaaatgctactatatattctaatcctaaacaatcttgcatgcctatctgcatcatggcggctgaacagaggtagagggagccatgaaaatgagtaaatcaataagtgcacttctctggactttgcagataaaagatctgcttagtgataacaatattccattccttgaaccaacacttcgtaagcacatggtccaagggcacttcaataccccaaactttttgcagttgaaagaacgacaagtaactgaagtaagtctccccctaccaaaagagcttaaacatttctctattaaataagaagcagagagacacgtatgaacatccactctcagaaatctttctttcgagactggtcacctaaggttctcctccaaatacaatgagaattatagggggccataaggttaattactccgtgaattcttaagtcatttttctttttccagcatcaacaaagaaagtatagatcattatttctgagtttcttataacaaagagccaaacagaatggttcggcctcttcccaaacttttgcaaagaactgacctccaaatcaagttaatatatcctcagtaaaattcagtccttcctctctaccagcaaggagcactttcaatagcaatacacaattatcgtgggtataataagaccagctaaaagggtcccaatatcttagatttctgctattaaaccctcacaaatctgaaaagagactatcaaatggtggtatagctacgcccaagtaacacagttgtgtttttttgttaaaaagccagctatttatcataatgcaaaaaacaaagctcagaatttttttattttttttatttttttgaggctgagtctcgctctgtcgcccaggctggagtgcagtggtgtgatctcgactcactgcaacctccgcctcctgggttcaagccattctcctgcctcagcctcccgagtagctgggattacaggcgcccaccaccacgcccagctaattttttgtatttttagtagttttgtatttttagtagtagagtttcactatgttggccaggctggtcttgagctcctgacctcgtgatctccccgcctcggcctcccaaagtgctgggattacaggagtgagccactgcacccagacttttttttttttttttttttcttcttcttgagacggagtttcactctgtcaccaggctggagtacagtggtgtgatcttggctcactgcaatctccacctcccgggttcatgtgattctcctgcctcagccccccaagtagctgggactacaggcacacgccaccacacccagctaatttttgtatttttagtagagataggaattcaccatgttggccaggatggtctcgatctcttgacctcatgatccaccagcctctcctcccaaagtgctgggattacaggggtgagtcacacccagcccaagcatataaatgacttcagaaacgttagccttcctctgaactgcgagttatctcattgtaagccattgtcttcctccaaaggacatggtggcttttaagaaaatttgctccttttcctcgctattaagatataaatagtaattgtgcacgtttattagaagaagccagttacaactagaaggacatagtgaaaatccataatcttacaaataatactgagttcaggctataattttttgtggtgtacacagagcagggaaagaatatcctggcagttggcccaagggcttactaattatgtgcagccttttcaaatgagagctcccccaaagaatgtaaacatagctcaagcagggctgtagtgtgttgcttaatgcccttgaacatggctgtgttctatctgcttgtgaaccagtacttcaggtttttgagatatgggtgtggccacaaatgtgagataattgaccaaataattacagaacaattcccagaagttctctggagctataaaaacctaggtctattggtatactcaaactagataaatggaagctagtgaattttgtataattcctgcatggaaacctcctttcacctatacttccaaagctctttatttgtacaatcttttattattgcacttctcatatgatatcacatacatgtctccctcccattctctaagctcctcaaatgaagactgtggggcaaacagcagctgctcataaatggctgcataaatgaaagacttttggtaaaaactgacttgtgactttatcctgaccaaaactttatctaatcgccaggtatcaccattcctctagctttagaaaaatgcttactgttctctcatcaagcctgacaagactagccacaatctgactacagtaacactaggtaggaatgctcatgatatttggtttagctctaattagtttctggtatattttcatgctattattgttagtgctgtatgcatcatttaatagattttacgaccctctacaatgtctgaaactataaacagaaaaatgagctcaataaatgtaaatgatttagtcttccacagcaaccattatcataaatcatgaatggaactatcagtagcgattctgttagttttctgcctaatagttttggcagaagttcaaggggcatatgtcggctcttggcttgggaacagaataatggcagtgccttcacaactcactatatgctgaagtcacgtttgttgccaattcttttcatattcaaaataattttctggtgtatgtaacacaacttattttctaaagtatgtgaaataaagtagtatgaaatcaattattagcttcaggttttgtaacctcattttataaaattaaaagtcctacctctgtttcctgccccaagccagtggactgtttaaaatgacacttgcacattggaggattctttatgcttgttctgaacattctaaattagataatacattatcacagaaactcttctgggggtgtactgatttaactaatccctttgaatgccaactaattaaaaatatttagcaatatgtagcttcatatgtacaaacataagatgttcttttaaagtactgaattatatatacttcaaattctgaaattatttgatagagaaaaatctttatcctgctcctatgcagaaatattgtagtttcaaaagctcaaataaattggttacacatgcttaatttttgaaaaaaatatacatattcaaagtcactgatgtactagtcagattttaggttttaaaataaatctgtacatttaatactagctttataattaggtacataaaatatctttattcccttaaacgaacatgcatataaacaatttttcaagtaagaaaagtactagtaatatatcagcaataaatggcttgatctattgtgttcatacagcaaattacaaggtaagaactaatcataaatttacatttagataatgtactattttaagtgctatatacatttcttgatttttttctctttaattttgctcattttgacagactatttgctttccttttgcagataccctacacaaagagcgatgattatctccttccaaacaaatagaaatttccatttttgacaacatttctgcctgtttaaacctgctctatgcactgaactatcagctatgtttccatgtgattacctataaagataggcactttcaagtttctttttttaaagaaggtgtagcatgaagctgcttatttctctttaatgtggcagagtcattctgcaattaagacatacctaattaccatgttttcaacagatgcaaatggagctcaattaaaattctagtccatgttacaaattaaggcactcaactctgaaaggtatcatgttaggactggatcaccaacaagtttggaaaagatcgggcatttacgtgttaatgatgatggagaaaatgactttgggttttcattgaagtgcaaagttctgcagctactgccataaataatctatttctatctaaactttacaaacattttacagtcaaggttgactcaaagcctcaaggtcattagagtctatttcccccccccattgagaagtgatgctactgttgatactataatttctgttggccgcttatccaaaatccatttctccctttattcttcctaatagaactctgtgtccaggaatgcaacctagctccaaggggtgaattcattattaagtttatggatgccatacccctgcagacttgccagtccaaggttatcagaccaagaatggccccgttggactcaatggacatatccatgcttagggagagggctcattcccttctgttagacagcaataagacagtaaaaggcctctgagccctaaaattaccctatggatagctgaattatggaattattttgtgggtagctgactcatggatagcagagcagaaggggcagaaaaatgttgggtctttggagaaatctctctgaagaactctagaactcaagttatgtaggaaaatgtatttccttattgtttgagttggtctgagttgcactttctattacatatagctgaaagcatcctaaaaggtacactgcataaagcaagtgttagagcaactgtggaatatctattgtgttatttgtcttaagtgtataatttagcagtaaatatcattttaggtagctttggcaattttactagatttaaataatttgtttagatttgctactagattaaaatgaattgttcaatgggtataaatagagatatacaaaacgaaaatatcatagtattactttgtatttaaaactcaacaatactctcctctgagggagaggccccaagaagcatcattaaatactcactgagcaattaaatgaaggactgaataagcagccaacaatatgaagaactgccctttgttgcacccatttaactatgaactaccttagaattaggaatacttagtaataggaacacagatacttgagcaatttacaatttatattgaaagataaaggatgaaatgtaaaaattctacacagggtgactcagtcttcacaagctatattcttaaaacaaaacttttaagttaaaatgagacattcaaaatagaaaatttcactggatttagtaaatccactgaccactaccaatttctgttagtgttaggtaaaaagataatacaactaaatgaggactggactttcagtcgctgcaaactcctgcataggaatcaagaacgctggggacataaatattgtttttatttcttattttggtggaacactttgactttggaagagaaagaaagatgtaggaaatgaacagctagtgatacacagatggtgtcgaataacatgatctgctcttctggactctgacttttaacattagaatgatgagctcttggcaacagaaaaacttagcttttcctgaaaaccaaaaaaaggaaaccacacacacacaaagctggcatgaaacaggaagactttagagcttttagactaatacatggggtgagaataataactgatatgatgaagactgtgaggaggtaaaaaagctatgaaggaatcaggtgacatttattagtggtattgtagagtggtttcagcaactgggagaaagttcaaatagatgactcctcagacactctactctaaaaatagctctatttcatttttaaaaaacctttcaatatatgtgggtgaaggaagaaaaacaataggatcactcttttaaagagttattaccaaaaacctttcttcacttttacttgacattctaaacttctctttaacccatccccctcaaatgaagcaggtaaaatgctcccacagataatggtagaatgtcacctccattatccctcccttccctagacaatgttgcagagcaggcacaatgagggtcacaccctcaattttctgaaccttcgcaaattcgcttttagtgtccaactgattttaacattcaaatgacggcccacagtggatgctgttttctgtccatggggacaatttaaaatgaagctgaaggctttttaaaaaccaattctgaccgaaagggctggctacacaatcgaaatgacagcattcctaaccctacagttggaattgccactgagaattttattttaatcaaggagtgagcttaacgtacacaacgtctgtttgaacaacatacaaactattatttatggtcaaagaaagagatttcaggccactgctcagactcttttgagtgaaacacaaaaattaacagcataaaaatgtttagagattataaaatagtgaatggctagcaatgctttactttgcttttgtgtgtgtgaggaatcagaatgcctgcttcccaaaagcgaatgttcttacctaccatgaaacataatctatattgagtgatccgcaaaaatttcctgatgttaaaaaaataatttatactaaaaagtctcggatgcactgtgtagaatcagctggagcttaagaaaaactagattgtcgggggaaaagtttcttggagaaggaagatgacagtataatatacacacattagagggctggggaagaaagaagatacacctcacgaagtgtgcaccgcatggcacaggcaagggtaagcacggacacttgaggggctgtgagagtcagaaggtgactgcagagctcactgggcacatctagagacaggaggcccagttgggagacactagcaataccttctgatattaaataacgagggtccggcctagactgcaagtaaggggtgagattagattacatgtggaaagattaagaaagcttggtaatggagtggtgacacagtgagatgatgattccaagtttctgagcctggaagtgctaatgagagaaatcacatcatcatcatcatccatctttgtgtgagagacgctaagcccgtaaacagtttcttcctttgctctggtactgccaagcatcatcgctcacctggatgattgtactactatcacagaaattagctccttgccctgacgttactacttatcatcccatctcaataagccaccctctaccccagagtcccatcatattattttatttgaaatgcaagtaatttaaaatagtctgtggtttgctgtctacatctttttttttgagatggagttttgctttgtcgcccaagctggagtgtagtggcgtgatcttggctcactgcaacctccgcctcccgggttcaagcaattctcatgcctcagcctccgaagtagttgagattacaggcatgcagcaccacgcctggctaatctttgtatttttagtagagatggggtctcgccatgttggccaggctggtctcgaactcctgatctcaagtgatccacctgcctcagccacccaaagtgctgggatgacaggcacctacatcttaaacctcactcctcactatgctctcacctgccccatacacaccaacctaacagaactactgcagcccagagatggctccccattccctatgttccatatttctctgtgcatccagttgaagactctcaagcagtaacactcaactcggccaatacctctcttctggaaatctcctcctctactttcctctcctccctaattccacatcagctgggcacccctacaccaccaccccctccccagtgtcacactaacttacacactacaatggaactgaaccacactccttatcaagtgctcatttatccactgggttgaatcatcccccaaccccgagcccttaggaactaatagcctaaatatcagactttaggtacacactctgcagtagttttagcgcaatgggctttctgtttggaagtgtgtttcatattctagaaaaaccacaggactgagaattagaagatacgcattctaagattcagttcctaagtgtaatcttagtcaaatatatagatactatttcctcttaaaaaatggggcctggtgcggtggctcactcctgtaatcccagcactttgggaggccaaggtgggcagatcacgaggtcaggagttcaagaccagcctggccaacatggtgaaaccccgtctctactaaaaatacaaaaatcacttgggcatggtggcacattcctgtaattccagttacttgggaggctgaggtaggagaattgcgtgaaccaggacctgggagttggaggttgcaatgagccaagattgtgccactgcactccagcctgggctacagagtgacactctttctaaaaaaaaaaaaaaaaaaaagttagaaatgaggattctatcattcaaaacacttcagatgtcaatattcattgcactttctgctaagttacattttacctagaaaaagaaatgcagagaatacctttggttatttcacaaccatacacccatactatgatcagaaacctcctaaaaattaatcgaagctccctttcttaaactgcaggttaagtatatgtatcattttatttgcataaaatgatgtgataggttattcttcttcttagcatttcagaacaagtatttttatagatcaacatccaattatccactaaaatggattaaccaaataggaaacagtttacaaagtactctgactttgaaatctgatcccaaattcttccacaatagatttactgtaatccactgtgttttgcttatgataaaattatacttagtttgcattatttttgctgaaataggtggtgatgaaaggtggctagaagtgggtagaatactgagagtagaaaatgagatatcaaaggcaatatgttatttcatagctaataaaacaataacaaaattcccctagaagctctcatattagttgatttaataatgtaaattcagtttcttcaaatttcatactgaaaacctaaattatgtgtattctggagcagtgcttttctcctatctcttaataagagctctataggaaattatgcaagctacctacttcatgtttgaagacaatgccttcatgtttgcaaggcacaaagtttgtcacatttaaaattctgaacttgatatatcttaaaatcaataggtataattaataggagatatttagttttgctgtttcacttcctcaaccttaacaaaaagctgttacaaaactgagtgcagggcttacaatttctggcaacttttaattacgaaaaagtagaattaatgtattttttaaaagaaaacaaagcaatcttactgcatgcattttcttggtagcaatagaaactgatttatcatggggaggagaagtcgcttgctgagagccaggctgggcatgtaatttgcatagaagagggagcagattgtcaatgccctgacctgtcaaacacaggtagggcctcggagataatgggtcccagaatacaaagctccatcttgatccagacagacgcacacaacatggagaggccagatggattaaatgagacacaaaaatgctggcttctgccatctccacaggaagaatgtaagtgctgcagaagatgacagataccagataccacatggatcccaccccagtctcttggccccattgctgtgcccatgccatgatttccacactgctgagaagaggccagcctgttcagtgccatgaatatagtcactggggaggggctcgacccaactgacaaaagcaatcaaccatgcctacgcctatgtgtcttacttgtaaagaggaaaagtgccacatgatgatagaaatcagagcctgcagcacggtgcaaggagctctctgttcctgctgacctccataactagcttttccacaatggctcagtctctagccacgcatttccagggtgcactgcatcctcaggaaatgtcccatgtgacaaaaagaccatctgcctagacgagggtcctcttttcagatccaggttcaagggggatgtggctttttaatttctacgggcagctgtaactgagttggaccatcgggacaagaaagaacccacttcccctgaggcccacttagcacagacaatagaagatgttggacatgcagccaggggacacatagctaagggacaagcccagaagggcaaaaatgcaggagcatagccacagagacagcaagtccagagactccgctgtgcaggtccacaagccagacgctgaaaatggtgtggttaggaagccgaaggagggctaactgagccagccttctttccaaagctggaggcagaaagtgccttcgcgtcttcagttttatgtaagctgacagccaccagcagtaacaccacatttgatagacaatttttttttaaacaaaaacaaagagtttgctgaagtattgaagatctagtgcatacaaggtccagtgtgggatacctcactcacccactcatcgatttggcagacatttatttaattctatgatttgccaagctttgtgtttggtaatgcaagatggaaatagatggggtgttttccacatgggcctcgcaaaaggtgagggggttagcgtgccagaagtagggcagtgagggggtacatagaatcatggaatgttaaactaggaaggacttcggaaaccatctaaaccatctaagccagaacttttacaactttttcctaaatactcaaaaacaccctttttaaaaactaaaatttacaaaggatccccatgtacagaagtgagtaaaacaactgtgaaggtggtggtggggggaaggtgacactggtggcctttcccactctccaaacccattgaggtactgctcctgaccagagatcacaacacaccagttgaaagtcaattatctagtccaaatcttcagttttacaaatgaagaaattaaagctcaagcagttgaagttttgactaaaatcccaaattacttagaagaatgtagaggaggatgcaagtcacctgaattccacttctgtgttcattccaccctataaacacgatttcaacaaccaaaattggaaaagtttggaatttacaatagttgccattcatttgccatatgcaaagttcagaagactggtatgcaaaaaataataaaaacaggacttttgaaaaatacaacatttggtggttgtaggtgcagcgtgttttagggcacctgccacacgtgtatttcccaggtcttgtccagaactttatctttggtttgcaaattgtaatttgcctatccatgtgtttcatttcactttttttctctgaaggacagatacatgaatgaactttaatatactgttatttctcattttgttttttaaaaaataagtttatatagggacaaaatcagatgtccatgttggtgggacactctggaggctatccctacagaattaaaaatataccttatattcatatgtattctatctcctgttacatttgaaatgagtgaaatattataagagcaaactgcattttttaaggaaaattaaataacattttaaccagaacaagaaaaaagttcaaaagcatcattatagatacttaaaaaatatatatcaaggggccaaagcatagtaatttttgattaaatatacacccaagacagagagaagcaagctctataattgtcaagtaatattgattaggatggcaaggaaccattattacaaagagaaaaaactcaatagggtcgaaagcttatatgactcaggatcttggagaccaggtttggcagcaaaaatagtaaatatgctcctcatcctgcaagaatgggctgcatatattcacagccgggaggaagaggtgggcctggagaggacaccaggaggctgcaactgggtctggagaggctgacctaaggaagttctgggcctggagaggccgccaaaagggaaaaactgggcctggaaaggcccagttgtgaggaatctgatcatagtgacaaaactgcctggatttagatggagaatcaggtggaggtggagagaagtgtagcaatcctctaagttatgcttcgcatattacattatgacagaaatattcatcttcccaaacgcattatatgtataagcattatacgtataagcaatgtatattaacgtatatatacatatacattatatgtatatgtatatattctcaaaatgtgatctttattacttaaaactcttcttcccacgaaagtctttcttaggtatatgtgatagaagtggtccactcaaatgttgaattgcaagtaatttacaatctacacaaattatctctggtctctgccttagttttattctgtggtccctccaactattcgtacaatagtttgatggttgagtcacatttgaggttaaaacactaaaaggtaaattagtagttatgagcaatataagataatcaacaattttcactattaggactcctaagcccttttgcttcttagtaaatatatcggtagagtttttccattactttttaatagaatgtttactttaatataagaaatgtttaactctctggaaggatatatttgtacctatctataaattattttttattcaataaaccatggaaaacattcatattaacctttgacttttaataatcttggctttaaatattttgcaatttcaaaataaacacacataaatatagcttgctagtttagttataggaaagaatgagtaattcctgaaagcaaaaaaagaaaaaaaaaatgtttttaagatcacagattattacaggtactcaatggagacatcctatttgagacactacaaagtagtggttttcaaatattttgatctcaggatgacttcacacccctgaaaattattaagcactccaaataacttttttatatgtggattatatctagcaacatgtactgaattaaaactgggaaagttttaaaatattactttttaaaaacaagcaacttcgtgttaacagaaattacattttttaccaaaaaatatatatattccaaaagaagtgagaacaatggcactgttaaatattttttcagaatttttagtttaatattggcctgtaagacagattctcatatctgcttctgcattcaatctaatgcagtatcacaggacatgtggcctccaaaaaaccccagtgtatacttataagagaatgtgagtaaagggcaaataatatcgtcttattatgaaataagagattattagacctcagagatctcagagattaccctgaagaatcttagaaaactccagggctccctggagctcactttaagaaatagagtctaattttaattattattctttcagccattataaacttacaggtctccatgccttcatcatcatcatctaccgcgggtttatcataagatttgtcgatggcagctctgaagctctcattgcatcccctgcctctgattatccgcggccgtggacgatggaaaggaatatccccattcaaagtcacctcggcaactgcggtctgcagactctccaacgagcttgacttcttcagacccagggaaggacccacatctctgctgggagaacctgggaggtttacaagaaaaaaaatgttagtgtgaattagtgaaaattatgtacctgaatatgcactgtcgaaaacttcaggtacataacaattatttgctcaatgatgagttctggaatgcagatggaaaagacaaagaataaatgaagtaatagttgctaatttttatttttcccaaacttatattagatttggtctattttctctctttgcattaggaaaaactctaagtcattactttttaaaaaaaatttcaacagatgaaattgttgtcaaatcgttttgctccggtaataggaataatctaaaagaaccagaataacctggaagctcatttgaaaagcaagggaagatgaggagaaggctaaggtcaacaaccaagaataagctttgcacttaattaaaacctttttttttttggcaatttaaaattctttagaacagaagctagacatgcacatcaatgtgcattgtcaagtctcttccttgctaaactgcagacccacaacactgcataaggagtaagaccacgggggccaacatgtcaccaaaacagttagggcaacctggcagcaggcagaaacccaaccctgggaaatatggatattctataggaagagtaacacaagctttgaacggaaacagattacataagggctctctctcagagggaaataaaaaaggagagactggatatgagtacttctatctctaggcctgggaacaatatgtttgaaaaacaggtgatggacagaagaaagacgacttagcaattaaccagaacatttcatgaggatgacagggacaaattccgggaattaaaaatttggctctatttcctgaggatctagggcagaaggacccaagataataccaatagtaccaagttgtggaaggcaatcaaaactgatttctttaaccaggtaagacagcctcatccatcactgcctgacctgatactcaaaggtagactaatttagcttccggatgactgaaataccagctctgcaccaccacctgggcaatccaggttatagaactggttcttcatatatacagttaaaaagacaggtgaaaaaaatagagggtaggagaaacaaaatagtttatctctgcatggggtcatcagcccatatgttgatcatgttattacccagaagacaaatagttgtgacataggcttttcacagctcagaaaataaaatagaattaaaattacactgaaagactcaaaacaaaatttaattttttaagattcactgatgttaaatgaagctattttgggtaagaatagatatgtttaaaatgtagtacaaacaggaaggcaaacacatgattctaatgaagaaataatattccacaaattgttgtgctggaaagaaaaagatgtcatatttagctttctcagtgcaggtttgtctatatttctttattttatgacaaaagttcatgagatttatttctttgaatgagatccatcttactttttctctgggcagcactacaatttttgacaactgcattttctaaattactcataaaagtcatgtcatgggaagaaaaatgaattttgttccaaaaacctacataataagaaatgaaggaataaaaaagaatgggaaaagatcattcctgggcagggatatttacctttatagttcctagaattagcactggaaagatccttttgtgaataaatgtctatcaactttcataatttaccagctatatttggcttccatacacatgtattgggcaaatatttggtgctttcttgagtttattaaggatatgtgtatgtgtgtatgtatttgtatgtgagtatatatcatgaataaagatttcatgcttccagaaaaaattctcataaaaacaccatttatataaagcttttctttgtgtaaagttagctgagattttacttagtgtactgacagcaataaaaacttaaataataaatttcagaaatggcatgagtattcattgaaattgagtgtccctaagcataaacacaggcaaacttggaaagaaaaacaatggtcaaagtataattcgataaacgataattttgtaagtgcaattcagagcatacctacctatttgtttccctaaattcataacactctgaaataaccttttggcaaactgttgaccattgtggatggtgggccctgggtttgtggaaggtcaatgaactactctctgtatatttatgtatagatgaaaacttttacaataaaaaattatacaaaatgtcaattatctacaacttctgaacctgtaacacagatcagcaaactgtgagtcaaatgtggaaaattttactggaacacagccatgcccatgtatttacatattgtctatgactactttcattcaacaatggtagaatgtaaaagttgcaacagagatctaaaatatttaccatctgttcctttacagaaaaagcttgctaacattcgatttataatatgagtaacatacactttagtactatatttgaccaagaaactataacaaaggttttgaatgatatgttaggatttctcagcgaagttattaaaatccctaacacattgattcagtcaaatgtctttagaaaaaaaattaaaaggattccctaacaatacaaacagcattttactagtaatgaaaattgaaaaagtctttttgtacataaaatatatggaaaagattttatttacatcataaaagttagtatcttttgtcttaattttaaaacaatattttaagctcttactttacacatatcttttaggtcattagcatactttgctaatctctatacttcaagaatgaaaccattagaaatccaattctcttcttatacctgttctcccttgttataatttgaggagaaatatttatccccaaaatatgatacaagattcctaaatatggaaaaaaaaagagggaaatcataatcatactattttcctagatctgtttcctattcctacttagtaatatccctcttgccaaaaaaaaaaaaaaaaaagaaaggaaaggatgtcttttgcaaggggcagagggaaatgtaattcaattttcattatgaaaggcttatggctaggctagacagatgttcaatgctaaaatgccactatgattctcccaaaaacctttggactaatctataaaatcataatctttcttgaaaactcaagtcaagtgaagtgacgaaagaaaaataagtgaaaatcttttcactgtctaatattaggggacagggaaataataaaatatctactttaggtattttattcatttagatgtaaaatcaacagaccaagtattttgacatctttgtaataattttttgccccaatattttctaatttaatttggtagaatagactgcacaaagtgcaaaaaaaaaaaaaaaagttctttttctctagaatctagcacagtttgatttttgattagactataaaatctgccttgaaacttatgtaatgactttccatgaaagttatctaacgcactgagttataacttggatatcattatgttgtagatcacaataaactgtccttttccttatagtagctgtgagttggttaaattaagtatttttcttattttacctaactgacattgtatatgaagtcaggtcctttacctgagcagctcaatttggtttttatgactgtttacttggatcggggttattgcttatactgctaactgtaaaaactaactactattttacatatgtgaactatcacataacatttctctttagctctgcttcaataaactttaggtttcataagaacaacaaacaactcagtaagggataaggctacggttaactgccgtgcaatacagttaatcttatgatttattagatgtcgtttttacaatctatcttatactccaaagaatataactccaaccatgtttacaataatttttacatatatatatgtgggatacacattttttaagcagctaaaactaatttactactgcaagttaaaaaggcaaattgaagctaattagtgctaagtagtgtaactacatcatactggatacagattaaaacactattccaaacttataataagtcataaatggtcaattatacaaagcacgttaactacacttaaaagaccttcctgtgattactgtcatacaataacataaaaagcaaaatcgatgactataatgcaatcccagttcaatataatccattgtttctatggaatgatttggcagtattttagaagtaacgaatttagaacaagctcacaaagttaagatatgaagccatatgcattatatagtctaatccaacgtcaggttaattataagctaattccagcatcaaaaaaagaatatgcctttctgaatgactaatgatagcaataccggacgttgtcctacaatgaaaaacatttatattggcactattatctttcaaatcaaaatcaccactctgagaatcactttttggatgttaacctagacatcacatagctgacttaaaaacctaggactctaccataacagatcacgtttgcaggattttgattttttaaaaattgggataaaacatccttacatgaatataattaagaaaatctaggttgtttctagcctttttgaagcagtaaatcatattactatttagtaagtacaccactgataaatttctactaacagaaaatatttcttttcttatgtaattcaatttctcacaatgaaaacatctgcgtaagactggaatatgtatgtttacatggcatatgattggcagctctataattgtgataagctatgtgggccatcgtttctatggcaacagtctaactgtccattcttacctgctttctggtcatccactgtattgagtttagtctcgtcagctactgttaaaaggtaaatgtataatagttagcccagttagttcccatagcccaccatgcttccaccattcccagatctttttagttaggtgacgatcctcagctaatatttcatgcaaatactatgaaacatcaagcaaacattcataatcaaaaaaggaggaaaaaaaagcagtgtctccatgcaatatgccagtcatttcatttcacagacatgtgtgttatatgttagcatatcataattagccaaggcaatgcatcaccaaatttttctttatgcgtatgataaattaatgcttttagtcttggaatacaaacagccaccagagaacagcataagttacagttgattaacaaaggttttaaatcattcagtgtataaatataattaattattttactttttttttggtggatttggatttaaagagacactacctgattggtgtttgaacaactatgattattttcctcctctcatttgctcctaaatactttctataataaatactctcaaattattactttgattaaatgccttaattatcaaaatatgaaagcttccaataaataaaccttaaagaacagcaatgaaaggaagacatcatgaagtaaccaaattctagacatggattgagataatggtttctctccaaaattttctcttctagttcaaaaatcccacaaccaaccaaatacaatttcaatgaaattggttttaaatagccaaagtgttaaaacatttcattttgtaaaataaagatacatggacatagcatgatatgcatatgtgtttgtttccattctcttaagaaaacatatatattaacatattgcatattatgtaaacatgccacttatgagtaatatcgttatctcaaactgggagaaaaactaatttttgccaaattgccacatttcacatttattttctctattgctcaaagtaaacagacatctgcttgggaccatcaattttatcctgaaagcatttaaaacttatttagataaagattcatggagattgtactcactacctaaatccatgctttttgattttcgtgttttaacgaaatccaattgactggcatctgaaaattgctttgtgcgtttttctgacatactctgacgtccaaatccttctcgttgaaaagcaagaactggatcaacatctggactcaaagagctggagtgaagaaaaaataaaaataaaaatatttactaaaaatagcacgcatccattttagggaggttcatacatacctgcaagtgtaaatatacatatgtatattcctcaagaaaaattcaactaaataatacaaatacagtccattaaaaaaaaaactgtggctgtatagaaagtgatagaaaaatacaaaattaatttaacttttagagtaactctttctccatgtgaattttctccttctctactttcctctctgtttcttcactctatttgacaatacagaattatttcaagatgatcataaaaaatgagcctgatattagaacaactgaatttttcaggaaacctgtcatatattatatacaaacactagcagcgaacaagtgaccatataaattgtaactaaatagaagtttcaaaaagagtacattctagccttcttatgtatcttttatgttgtgttttaaggaaagaaaaaaaatgccattatggcatgccatttcataaggctgcagtttctctgaaatattaaaacaaagaaatcaattcaacaaacatttattagaacctattctgattaaggcattgtgccaggtacgtagatccaaataacagataagaaagattccctgtactctatgagctcataagaaaaatactaaaccagaagtctgaaacagatgctgaggatgcatagatgagtgaataaacagtatatgagaatcaggaagaaaatgactaagtttagatgacatttgatttgggtgacaccaacacagtggctcaagcgggcatgataaggaagcatatggcaaatccctggtaacaggatgccttctgaagtgttcctccaacgcaagtggttgaagatgtcccagaatcactcctgtttgtaaaaatctgtgaacacattctaaagtgctataaggtgttctagccacagttcataatatgaaaagggttttctctgtgctgggcacattgggtaagtaagtatactagctctactatatcaggtccggccaccttgcctatctggccaggtgagagaacatccctctacagctaactgagcacactaaaaatgcccagggctccttccactgtcagctgaatttatgatagtcttcctcatgtttctgatggaagcaagcttttccaaccctttatggccttataagaactatcatccatactagtaaaaaaacagtcaacctttggatgtacatcagaaatttagttgcgatttactgtgcatgaaatgagagttggctcttaaagagctatggtaaaagtttgaaaagtaagatagcaggcaaaagccctgccactgggtagggtgacttgaaatgttttgagctcattatgtattaaatatgctcaataaagagaacagttgtctcattcacttaaaaagctaacaagagaattcagcaacctaaggtgaaagccccatgtaaattgctaactactaaacaagtcagtcatcacccaatgaagactatctcaaattatcaaacacaaattatgatgacagacatctaccctcagatgccccttcacatactactatgcttaggtgtaaatggcttatatgatgagagcacatacacccaagtgaaaaaaacacacttctaaaagtaaaaaatcaaaacccatatgataagaaatatgacacaatcttgcaacagcaaactctaaataatatatttccaataattcttttatatattgtcagtggatctcttcagtcactctgcacatgctaaccaattctttttacctcttctagaataatttaaaacttcaactccctacttgggaggctgaggcaggagaatggtgtgaacctgggaggcggagcttgcagtgagccaagatcgcgccactacactccagcctgggcaacagagcgagactccgtctcaaaaaaaaaacaaaaacaaaacaaaaaaaacctcaactccaatactgcaccaaacttgtaaacagaatgcatttgaaatacagtgttagtagaaataaattgttggtaaaagatttttcaaagaaatacaaattgtcactgccaatctcgcctgaaaaccacatattggtgcacctttaattttatatcctctaaaattatgttaccattaagattagaattttgctgttatttcctttcccccagaaacacattattaatgttctctcaattgattaatggattgaaaatagtatattctataagtaaacaagtaagtttagccatttgacatggccttcgacaactgtgcagtgaactacatgtacaatttaaaatgtcaaatgagtttgtgcattagtaagagtcttaaataactaaatattcttaaactatgacaaaattaattcttccctatcaatattcccactaaacttatttcagacacaataaacggtacactggaatatttaacaagttagatggcaggaatgacagctgattctttaaagaatgtaaccatatcctgacccctaatgttattaaaattccagttattaatcctgtcttattggccttttgttttcatagcattttcatcaaggattagggaagatattgtcaggctggaaaagcttgcattttctgctgtgattcagaacagctggcattcttgtttggataacccttcattcatattattttctttgccccacattccccacagcaaaattatccaagtcctcaccattttgcaaatcccccttagggaaattaatgccacaatctatcccttctacttatttatctattttcactaatatactgctttataatgccccaaagactatgaccacctccacaatttctcatcatggtagagatttaaaggcttttgtccctaagatgaacactgcgtctatctaatccttgctttctctgttgttgctactttcattttcagaaagagatatgagacacagcagtcaatgtaacaccatctgcagatttcaaatgggtttttactttatattgtagtcttcccttctatgtttaatcaaaaacctcattcaaagatgggccattatcatacaggtttgagggtagttctatttttaaatcctgtgctttcaaaaagagaatttaaaaagaaagaaatgaaaagctagagatgaacttttcaaggtcccaaataagaggtgtgatttattccaagagaacatcttcataattaacagataaatgaactgtattttgtgtgttcatgtggagagtcagggaagaggattgggggagtggttcactttgttaagatcatcactaaaaatgttaacgcaaataaatgccagtcccccagacacctcctatctaatatttaatgttgacacaagccagaaaaacagtaggaagcaggaatggctaagtggtgaaggaacaacaccataacatttaaatatgattttgctgatatattcataaaagaccccagagaaagggcaatgagaaaattctggtacaatacttcacatggtttgtgttaattatcactacaaccttgtgaggtcgtccccaagaggagctctgcttttgcttattgatgtatataattactaggcataaacattaaggcacacatccaccttcatgagccacacattggctcagtagtatcaaatgctttcttctattttgaaagacacaggaaagaaaatagcagggagtgccccagaagtcactatgttaaaagcaattacaaagcattttaaacagtatggttatagcactctgaaaaaaaaaaaaaaaaacactttaaaaaaagcctcctcccactcttagaacacatcaactcttagttttgcaaaagtatctaattgttgccatcaatttagggagttaccaagaatttatttaattaaaaaacaatgcatcaaattaacacagatgtgaaataaatcataaagtgaaagtgaaaaacaaatgagcacggttttttgactggtagtagttttgtcattgttttggttatattactaactatagctcttgaaggctaaaacaattaaatttacagagttcgggtataatcttttattataagagtgataagtatataaaaaccatgaagacagagctattaaaaaaatgattaactgtatttagcagtaagccacttaaacataaaatgggactgtaattaattcatgttttccaaccctggacgatgagcttaccagtcggctgaatcactgattgcagccttggcccaagtaccagcatctgccgtcacaaaccccacatcatcatgggagctggaagaggactggtcagagagatgtggaggaagcactggcaacctgtcatcttctataatgacagtgtcatcttggggcatattcactgtaggggacagctggtatttacctgtccagtgaaaaaagaagaagagaaaattctagacatcgatcaaagtgttacatctattaattttaatactttgctatattagtaaaagtctaattttccacatatctgctcaacctggtagaacaaaacagaatttagcacatttatttttcataaatgattgtcaaacagagacctcgagtctattactacctctgacgctacaactatatagctcagggcaatgcatgcaatttttctggtttgaagtttcctaaagccaaagatactctctcaaatgtcttataatgtgaaaatgctacacgcattctaaactgtgaatgtcctttgaaaaattaccaggaaatttacaaagaagccccactaacttgcattgtttattcattcattcattgagcaactgctgcagagcaggtactgcaagacacagtctctgtccttaaaggacgtatgccctagtgaaggagaaagaattacaagcagtgataattatatggtggtgtagagatgagtccaaagccattcacttgtgttgtaattgcctgggttactgggggtaggaagtgctggaaatcttggcaaaagttaacatcagaattaggttttaaatggtcaatatgatcttttctgccagaagaaatgatgatatttattttagatagcaacaacatcattattaaatgcatgatggagaaaagcccatgatgcagtcaggtgaaacttaaaagatgagtattaccaaaaacaaagcctagaaaaggagagatacctggagtgatcttgatgcaaaaaattaggatctgagtggccagaggtttttcaggccatgactgaggatgttgggatggcatacacaagcgtgaaggatttttaaaagtctgtattgtattgttctagacatttcagcaaaggagaaaaatttatttaaattgctacatcttttcaggataacccacaaaaagtaaacttgctggggatttcaactgcattcctcatttaacatcaactacactattgtagtaatactgtaagttcactgaaaccccttctcagcacgttaccaagaaaaactttctctttgatttcaaatgcacccattttgacaaactatgaaaattaacagcttatataaatgctaatgataaaaatgtaaatcaaatgtaatacttagccatttcccttacctgaattcaaattactcatttatttctaatacagtattagaatattaggatagaaacctgttcagcaaaagtgtcattcatcaataaggtgggactttctagcactattagccaagaaatatttccttctcaagacatacttttttccttcaaagtatatagaattataaaaccagtcaccccaatggacaactcaccactgacgaggcatgtcacaatattaaataccaaatactcacacgggcataatttattaaaagaaaatattacagtataatcatagtgcattcatttttaaacacaaaactaaaacttctggttttacacaatatattctgagagatggcctaacaaagcaatatgaacactgaaaggggcatatgattttttttgtaatctgttgttctgagtagaaatattataccttaactgttgtgatacaatattgtatacatagataaatggcaagaaatcttcctcatagtaagaaaataatttagcatttttttctcacccatgatttgaaaggctagtatttccacaagatttgaaaacccatattttccacttcttaacatgcttgccaggaatatagttttgggttatggctccaagattataccagggtaatggacagctaaaaaactttacatattctactaagctgcacctagacaatacaatgatcccttaattatgtttgctagtagttggtacatcataaatgtgaaaccttctatgacttgagaaggcttcaatttatttctgataggtaaactttcctctatcttcaactagttaactagtgacctacaaactaagtaaactagtcagtatcttgtagaggagtgaaacaatgaaatacaaaatgtttgtttactaaacatttattcattggcaaatttacatagaaggtaacaccacacatgatactagaggaaaactgtgccagtgacatgactcacaataaaaacattaatgtttcatttttctatgtcaaattgctaacaagataaaaatgttctaaatacgtcttcttaaactcaccacatatatatgaatatacaaactactgagataaattctaaaatggatacaacagatttcagttttgttttaaaaagaaaaattattcagctaaaaaagttgagaaatagttaaagtcccaggcttacaaatgacaatgtgtgatgtcttttacgaaatggatgtgctggttaaattagttatgctgactatccctgttgctggtttttttgtttgtttgtttgtttttgtttttttttttttttttttggatatggagtctcactctgttgcccaggctggagtgctgtggtacgatttcagctcaatgcaagctctgcctcctgggtttaagcaattctcctgcctcagcctccccagtaggtgggactacgggtgtgcaacacaacatccggctaatttttgtatttttcgtagagacagggtttcacatgttggccaggctggtcttaaactcctgacctcagttgatccacctgcctgggcctcccaaagtgctgggattacaggcataagccactgtgcccagctgcattgttgctgttttttattgttagttaagagagaccaaccattagaaaaatgtttaaggcttttcaaaggaagaatcctatgtaggcagccccactacaggttactttctgatgaatgtccaggactattacaaaatccatgattgtggaaattctgtcaaaagagatgacagagaaatcttgcctttggtcacaatcctgtctgaccccaacaaaagctaaggaaatcctaatcaggtgtgactcatgataaagaaaaacatgcatccaaattttggttcagaagtacagaaagtgtgcaacttctgtcaagttaattaatgtatttgctccataactccccgacatataaggtaagttggctggagtatgtggtttgaaggctgctttcaaagatttaacgtctttgatttttttagtcaccatgggtgccaggatagaataagatctggagactttcgaataactgcttacagatgtagataattataaattgatactaataaagaatgaagatctcagcattccccagagagggctatttttagaaaaaggaaatagccaaaaacaaagtaaaacaaaaaacatcatgggatatcaggacttagttcctcatctgttaaatgggaaagtgtgactgatgacatctgacatcctttcaactctaaaggctcttccttttggggtgtatcttttaaaagcctttcgccagggatgtgttcacataggaatgcatcacaaagcctcaaagctccgtttagcctagagtcctacataggggattactccatatgaaaattcaacctgttaacataaaattaataactccctaaggtaatcagccagaatttcaatacaaagttccttttgtatcatagcagatcatgaagtaaatacctcaacctccactaatgtctacaaaggagtgattccaaacatatagaagacaatcattaaccaaacagtctgaggaatatctatgcgcctagatactgtgcaaatcaataaacactgttgttattggtttaggcgaatggaaatccaaagtcctaatgtctttggaactatggaattcatgactcagaaaaacataaatccgaattttggttcagaaacggtgtgatttgtcaagtttcctaatttttttgccccatacctctcctaatgccttgtttgggcattctcttgcaaggtaacgtcttgaacaggatttctaactttaagtggtaactaatttcacaaattgcatttgattcttacggccaaagatactagaataaggactgacaaaaagtgaggaattttcaaatttgcaaaacacaagatgaatcaaaatatgcatatatacttgtcagggtaaaactatttagaatccctagtttccgttacaaattgtaaaaattatcttaagaaaatatccaaatcataaaaacatcaatttagcctacccttaaatagtaacgcatttgtcacccccagcccaaagtggtaaaagggcatacacatcacaaaacacagaactgggagagaagttactgccctggggaagcatctggagttttaagagttcagtacatatctagcagaaggaagaggaaacaatgtcaactataatgcaaaccgaagaggactaatgaagctgtagctaacaaaatcggggcaacagactaggaagaaaatgaatgactcttcaactcatatatacagcatttcaaaaggtcactagctgaatttagggatttttttggtttgagttttagttttagtttttcgccttcctctgaagcatcagggattggaggcaggacgcaggttacaggaactggtggaccaatggtctgattcagtatggcaagtcctatgttcctataataaaggggaaattacagcatatcactttgtgtgcacaaatatctagggacacatgcacactctctctctctcaaggggactgaaatttcatcaacaaaaaaataatttaacaaagataaagatttataccaaagccaagaaagtacagaaaatccaacagcagtgaagagagtggtaagtaataagcaaagatttgaaagtgataaactatgtacaaagcctttcacctgacaggtgttcaacccaacaggtgtggcactcttccctgacattcacttacgccaagcatgtaaaaagaaaaatgttgacaaagtaacaccagaaagctggcttgtctaagttccacatgtaacaagataagaaattacatattcagcaatttttctaaactagaaagctagagagattagaggaagaaaaacagacaattctactagacatgtttatgtatgtttttgatcatgcccagtagaaagttctttgaaggcagagattgcttcttactcatctttgtatctacagcaacagtatatacacaatgtcttgccaatagcatgctttccataaacacccactgatgaataaattactgtttcaatgaggctccataatggaaacttgaattgtattaaatctgcattaaatgtactcaaaatggagttaaatttagggttttactttaaatgagagccttgcaaaatataccagtaataaaagtgttttatgtcaggtgttattttaatcaaaatggcttcttgtgttttaaatttgaaaactctcacaagctaatcgcaagatgagcagctcagtaaatccaaccactcctgtggcaaagcaagaatttatgaactggatctgttagtagaaagctgaactgctgcaaagcaagtgctaataacctcattacccactgggggccatgcagataggatggtactgaatccaaacaaaggatgcagaagactagtttcgcgattttaaaactaaagcttcagaaaagtaaaatacaattaaaatacagtaacatcctattaaatacaaaccagatacatgtgaatattttatatatgtgtgcatatatctgtatataaatattttttctccccctccaggcagtgccactgtgaatgatatgtaacttttgaatcctttttgccacaagccattaaattttgatttctttttaaacatagcttcacatattatctcaagtaagtaaagaatatcttgatcactagaaaacatttccatatgatccctttctttttggttgcttcgtcatgttacaggatctaaaagtcacttaaatcaatggattgatttacctcttcacatgaacacttcctgaatgattttaataaacctgttctcttttgtcttgaaaacattaatatttttatttacattaatattacactaatagtacattaatattacaccaataacctctcagtaaaccaatgaaagcatcaaaataagatgtgataaacagagttttacctgactcacccattatcctactgagggcagcatttctgctgggcgattcatcaagcccctcaatcccactgtagagggaatgggaaattcttcgttctctatcatccaacgctgtttcaatgggcagctcaggtccaggggggctcccaggtgacttcagctacagagtaacgggtatgggggcaaagaaaaatcagtacctggaggccaattagcagcatgggagaattataacaacttgcccgaggcctgtatccaactgggtaccaaatgaactagaacttttcaccctgtaccaaaataatttgtgatgacagctctgcctaatgaccaactttctgtgccactttataccatgcctcccatgaagttctgtcagatttcaaccgctggaggaaaaatatgtatatttaaggcttttttaaaatcagagcttgttgtttatttttccaatttgaccgttagtgtctgtttaagtcaatttaagttacagtgtaattcagaattctttactagatgttactctataaaaggcgtgcttgatcagaatggaagctgcaatttagctataggtcttaaacttatggtatgtaaatacatctaacaattagcacacatttttccatgtgtgctggtggaattattacctactctacaagacctaaagatatcagctcagatgtcttgaacaacacactgattttaaattcctcctgctagaaattaagaataatcatggtattatctttactgtaatgtttaagtacaagatagtagctgcaataatcacttcagtagtgtacagaacaatatgaaaatcgggaccaaatattctaataaagcacaccaagataggaggatttcaaaaacatatacaatctaataaataagcaatgaatgtatgtcaatttcgatgacaataaattaaaatgtatcgggcatttcttaaaacagctagctgtgtctaataagtcatattttacataaaaataatatgagtaagaaattcatgttagtaaggccttcaaacaaatctgttttaatgaaagaacatttaactacaatcctcataacgcagactgtgaggttcaccacaaggactggtatctcatgatgctttgatgttagacagacaggaagggccaatgtgggggagtgggcaggagggcagcatcacacagcacagcgggagagaaggcgctcctctcacacatgaaaccacaactgtcgcacttccttcagctgaacaaattattatttccgttagaagctatcatctgtttaatataaatgagatatttaatgaagtttcgaattgtagacttatctctcccagtttgataagcactggggagatttaatgcattgaagggtcaacacaattacaattggaggcacatcaaactgcaggagaataataaacttgcagctctagtgaattagactcaataaggtttaaattgtgaaacgaggatttgtttcatttgttttttttaaaattgtagattacaactgacagctttactgaaaagtaaattaaatattcaaggtctctgatgtaaagaaataaaagaacagtttctaaaagaatgtaatgcctaaattccaagagactctgggaaagtaaaaaaaaaaaaaaaaaaaaaaaaaaaaagctaataaaacgaatactctataccattaagaacaagtatggtttttaaattaacacacacactaaaaagtatacctacataaagacttgctatacaagactctataaacaaattctgtttactatacaataatttatcaaaagacagacaacatatcctcaaggttgcctgaaaaatgtatttaattgaactgtataatgctgcaattttctacatgataaaacctttataaaacttcttcttgagaaatccctaaatatcccaaaaggctattttaaaattttataaagccaaataaaaattccattaaaaaggagtacatgcaggttttctagagaaaaacagtaagacgtctgttcagaaaaaaaccaagcacttgaacattttcataggaaagattctccacctcccctacctctctacccatatttaatttgcatctcaaaagacagatttaaatgaagacatcaatagttgactacataaatatttaacagaagatacaatggcttttaatttcttttaaaaaaactgattggggttacagttttgttttaaatcttttgatgattttttgttgttgcaagaacaccagcttaggaaatagaaatgtgtcagagggggcaccagcggcactgaggaagagaggcaaccccagtggtcctgggagaatggctggcctctgctcccccaggcctgctatcacccccttgcaggctccttatattaaaaccttattaaaattaagcttcggttgggcacagtggctcacgcctgtaatcccagcactttggaaggccgaggcgggtggatcatgaggtcaggagttcaagaccaacatggtgaaacaccaaatatactaaaaatacaaaaattagccaggtgtggtggcgggcacctgtaattccagctactcgggaggctgaggcagagaattgcttgaacccaggaggcagaggttgcagtgagccgagatcacgccactgcactccagcctggctaacagagagactccatcttggcggggggggagggggggtggtagaattaagcttcattagaagaagaaaccaaagtaagcacaactgcgattttcattttgttgtctatttgtggtttaatgtgcaaaaattttcttgactccaactaaatacagtcccctgtagcagtggctgtttagcccctcagttccatcccaaggaaagtctttctacctattaaagaacaaaaatagctttaggttgcggcaagataacccacactcggtaggagtgtaaagtgatacagtcttttgctacagtaacttggaaatatattaccacagggcaaaaaaaaatcttatttttaactctttgaacaggcctttatttcatgttgtggtcactatcccaaaggaaataataagctaagtgaataatgaaaattcatgtgaatttatctgtggggtttaataaaatctccgtttgttgtgagtatgcattagcaagccaaatagtgtctttcacctaaagaaaatgtatcccactatctccactacaaacactgaaaagttcgtattggaatggccttaaacccccttcaacaaacctaaaactggattctcactggtgattggcaagatcatattattcaatatttcagtttttttttagcatattgtattttatccccaatgcctagcgtagagcaggcactggtggaataattagattagtaaattcattcctaaaagtgagtgagtcataatttccttaaaacacactacattatgtggaaataggctgttaaaactgaggacacgccatgatgttgatattaaaagacatttaacctagattacaaatatacattctggaaaatattagcttccagaggacaggtgaacataaagcaactaatgaaaacacagattttagttttggaggagagtgaaggaagatttagagcacagtttcacattctcttttcaaacaggaccacatttattttccttcacatccccatgagggcaatggcaagaaccagaaatgtgaggtgagctcctcaagtcagcacatggcagaaccagaatttctccgattacatcagattcgaaagcccatgcttttattgtacactacttcccaacgcaactgggatataaagtgcctgaacaacacaatcacagtcaattagatccactcacttgtgtaagagaaacagacattttgcttctaaattactttgccacctatgttggccttgcagccattaaagcaaatcatttgacctctttgcatttatttcttaatacagaaaatgaagagattcataaatgataccttaggcccctttcctattctaatatacctttctcattctaagagggttaagcctagagaaaaaattcattttaaagaagtccttgatgactaaatcccccaatatgaggtctaagacagaaagctcacctggcgatattctctactggcactaagaaaaagctttacataaaatcacttctaacatggatataataaaatgcctggaagctatgttaaattacagtaatttctacaaatattaatgtctttaaaatatttaaaactcagcataattctcatatagaggctattttcaacactcaaggaatgatgcctggcatttacttccattccactccagtctcgtttaaaaatcttcaacagagtgtcaacagctttctccactgtaaagttactcttttttgctcccctctcccctctcccctctccctccactttccatggtctccctctgatgccgagccgaggctggactgtactgctgccatctcggctcactgcaacctccctgcctgattctcctgcctcagcctgcagagtgcctgggattgcaggcacgcgccgccacgcctgactggtttttgtattttttggtggagacagggtttcgccatgttggcggggctggtctccagctcctgaccgcgagtgatctgcccacctgggcctcccgaggtgccgggattgcagacggagtctcgctcactcagtgctcaatcttgcccaggctggagtgcagtggcgtgatctcagctcgctacaatctccacctcgcagccgcctgccttggcctcccaaagtgccgagattgcagcctctgcccggccgcgaccccatctgggaagtgaggagcctctctgcctggtcgcccatcgtctgggatgtgacgagcccctctgcccggctgcccagtctgggaagtgaggagcgcctcttcccagccgccatcccatctaggaagtgaggagcgtctctgcccggccgcccatcgtctgagatgtggggagcgcctctgccccgccgccccatctgggatgtgaggagtgtctctgccggaccgccaccccgtctgggaggtgaggagcgtctctgcccggccgccccgtctgagaagtgaggagcccctccgccccgcagctgccctgtctgggaagtgaggagcccctccgcccagcagccgccccgtctgggaagtggggggcagcccccgcccggccagccgccccgtccgggagggaggtggggggcgcgtctgcctgggcgccaccccgtccgggaggtggacccaacagctcattgagaacgggccatgatgacgatagcagttttgtcgagtagaaaagggggaaatgtggggaaaagaaagagagatcagatttttactgtgtctgtgtagaaagaagtagacataggagactccattttgttctgtaccaagaaaaattcttctgccttgggatgctgttaatctataaccttacccccaaccccgtgctctctgaaacatgtgctgtgtccactcagggttaaatggattaagggcggtgcaagatgtgctttgttaaacagaggcttgaaggcagcaagctctttaaaagtcatcaccactccctaatctcaagtacccagggacacaaacactgcggaaggccgcagggtcctctgcctaggaaaaccagagacccttgttcacatgtttatctgctgaccttccatccactattgtcctatgaccctgccaaatccccctctccgagaaacacccaagaatgatcaataaataaataaataaaaaaataaataaataaataaataaaataaaaaataaaagtcttcaacaaatgtgtcctttgaggtaagtgaaaacaatttttctcttcttactttgtgtattccaaaactgaaacgatggaaaagaatgcagggactcagtttttctctaaaaaagtgaaatcatcctttaagggctttaaacaatgggaagccatctctttttctttgaagaaagaaaaaagaaaacaaacaatgatggtttatacaatgtttttaagtgtagttagataaaaccattagatctaagaaaagaaggaaagcaaaggaaataaaaattactgccctcaaaatcactttgtttgccttgtctgagggtgactctggaatttcagtttctaatactaacaagacctgtctttcttcaaaaaaaaaaaacaaaaaaaaaacgccagatggtagcaggcacttgcagtccctggctaacacggtgaaactccatctctactaaaaaatacaaaaaattagctgggcgtggtggtgggcacctgtagtcccagctacttgggaggctgaggcaggagaatggcgtgaacccgggaggcggagcttgcagtgagctgagatcacgccactgcactccagcctgagcaacacagcgagactctgtctcaaaaaaaaaaaaaagccagactctccagggttgctcttcgtcattcagcctgtgctgatgtgtcaggcctgggttggataccagcaaaggatacacaggaaagtggtagatggaccaagccctggcagtctcagaatccacattccagcaaaagaaaatcaaagaggaaaccatgatagtgtgacagctgctgggtgaaggggagtacacggggctatgaaaatcctttggaagagaaaatggaaaatgaaagactgcgttaagtctttgctaggatgaggggcagatagactcaagtggaagacctagaggtgtaaaagagcatcccatgtctgagaaattaccagaaacactgagtggctagagcagaggtgctgcaggggctgtagggcaccgatgacaatcaggcatgtcccagtggtccccatgatggagactggttgatcctggagacatggaaagcctctgaagggatttcagcagggactgacgtgattaatgtgttctgtagaaaaatttgcctgactgcagtgcagagaatggattgagggagaaagcctgattgcagagaaaaccctcagggagctgcagcagtgcgcctggtgagaggatgaggtctgaactcaggcagtgggagaggggaaagaggggagcggctaaaggaagagagattctaggccaggcgcagtggctcacaggcgtaattccagcactttaggaagctgaggccaaaggattacttgagcccaggagtttaaaaccaacctgggcaacatagtgagatcccatctttaaagaaaaattagttgggtgtggtggtgcatgcctgtggtcccagctactagggagacaggtggcaggattgcttgagcatgggaagtcgaggctacagtgagccggggactataccactgcactctagcctaggcaacagagcgagagagcaagacgctgtctccaaaaaagaaaagagggaaattctagaggtagaagcaacaggcaacagggatagggacagcatttgagaggtcaagggtgaccccagatctctgccttctacaacagaaagaatgtggtgccttgtgaattaggtgcccataagacataccaggaaatatttccctaggcaggtggacagagggatctggtgccagagtggacctgtgagctggaaagaggatgatagtattcatcctaacaagtggtttcaggcagcaagggagtggagatcagctagggagcaagagcagagtaaaaacaaacagacctggtggggcgcagtggctcacgcctgtaattccagcactttgggaggccaatgtgggcagatcacaaggtcaggagtttgagaccagcctgaccaacatggtgaaaccccatctctaccaaaaatacaaaaaattagctgggcatggcgcacacctgtaatctcagctactcacgaggctgaggctggagaatcacttgaacccgggaggcggaggttgcagtgagccaagatcacgccactgcactccagcctaggcaacagagtgacactccgtctcaaaaaaaaaaaaaaaaaaaaaacaaaacaaaaccaaacaaaaaaacagacaacagacccagaggaactttgagagacaggaataatgaaagaacaggcagaaaagaggaacccttagagaagacccggagtagggtagcagaaaactagagagagtacataggagacactttgagaatgacatagtgcctgcagattcctggaaggctaagcaaaataggctaagaaatagctcccagagaatgtctccaatgtgccctgtcgcgactaatgttagggaaatacagggctttaacataatacctagtgaagggagctgacaaataaatttaaagaaaacacattggaccaggtgaggtggctcatgcctgaaatctcagcactttggcaagctgaggccaggagttggagaacagcctggacaacatagcaagaccgtgtctctacaaaaatgaaaaataaagaagacatattaagataatacacagcacttccatgtataagagaaagaaaaatgtgacaaagaacaaaagattttcttttacacattcttaccttccctaactagaaattaaatatgcaaaccttggatttaaagatgagatagcaaaatacagttttctgattggcaaagactggactatacagctgattaaaagacctagaaagaaaactcagcacattattttggcttgagatttgttcaggacagcaggatgccctgtgcttatatcaatatttactataacataatttacacataccctcccagtgtgcaaaggagaaggttttcctaaggtaatgcataagtacaacagctgaaaaatcatgtcttataccttactggaagctgaattgagatcttctgtcttcatgtaattctttagttaaaccctatcagtacaaaagggttcttgctagtattacaaagatagcacagcactcataagattttttgatataattgctttataagcttatgctgtcctaagaaatagtaataaccagcaatgtatgaaaatgataccataaggaatattgaatattaaagtctattactgtctactgcagctgtttccttacttaaatcatattcattcacaaaaattcatatggagaagtgaataaaacacagagatatttcagggggattccaatttcacatctcttacagggaataaaatcagtgcttttatcaaaacattttcaggcaggtacaggtttactttgtcactatttggggggaacaatagggaataatctgaatcagataaaagcagaacactgatcttcagttcatttctgcattttaagtcctcctgtagcattcaatgttttctgtgaaggaaaacattgagaaggtgttaaaaattttaattggtctctaaaagactaaggtgatacgttgtccagtagaatgcatgccatctgtcttattcactgctatgtcctcaggatctaacacattttctgatacacataagatgctcaataaatatctgtggaatgaaaactgtcctgtgtaatgggaaagtattcaggtggccaaaataaaaaggcctaaaagagaatgatatgttttgtaaacttacagttgagatgttttcatatagtgctttgtgggacttaagttaaaagatcagctaatgattttgcaatgagtaaaaactactattcaatcagtccaggagggacggaaaagagaaaaaaatatcagtccagcatcctactgtgagggattagcttttatatttatcttacataaatgaatgtttgtatgtcccactcttctccactctgagattttttagttaaggttatgttgttctcttgatatcgcaattaatttgttgattactgttaactcattctacatttggcaaataaaaacaacaaaataattcagtggtcagtgatctttcagaatacgtcacctctatattgactaccaactgagctcgagagtatattttctctgtaaaatatgcttgtatcataggttcagatgagtggtcactgcaacctgaaaacggtgctttatgtgtttattaaacagaagtttaaaaattaagaaaaactcttaaacaacttaggtataattttcagtttgtattatttgctaatcattttatcttagttgatttgatcttaaaatgtgggaatctgaacattgatttaagaaaaacttcacattttcaacagctcattttgcacatgggcaagtctgacctattttctacagttggcacataatttataatggatccatgaaatttagcttttttcaagctccaatattatcaaggcaacatataatttatttttaactttcaaatgtcctattatacaacaaagtatgtttttccatatttgggaaaatagatgatcctacctttcaagagaggatgccctgtgtcctcctcacccctaattccaaactgcaacatacatttagaacaagcagagtataatacaatacagatcactgaaaaaggaggcattctaagagaacagactcaatcccatagagaaagagaaaatggggactgaggaaagagagggaggtatatgctattgataatctcacaagagaacaccatcatctaagaaagccagactgtgggccaggtgctatggcgcgtgcctgtaatcccaggactttggcagactgaggcaggagaatcccttgagcccagaagatggaggctgcagcgagctgtgaccacaacactgaactccagcatggtcaacacagtgagatcctgtctcaaataaaaaagaaaggacagggaaggaaagactgttccctactaggggctttgtaagaggcatcccattttaaataaatgaataagcaactgtttctctgcatgattcacctcccaggtataactctgccaactagaagagaaactgttggctctgagaaggaagatgtgaccctgatttcaagaaaaaattcagctaaaggggcttttgagatcccagtgtttcctgctgagttggcaataggagtattaatgtccacttaggaatatgttgatcacaagaattaagaacacaaaccacaatccacctacaaaataataaaactacaataagcaaagataatttatggtcttttgatgtaaggtcctggaacctaataccctttgcccaaaattaggacagaaatgtagtttatttacaattttagatactagcacttttttgcatttcttacctcattgcacttgcttattctccttgcaacaataagctggatcattcctcgtttattgccttcagtagacatagaccttcttagggtttccatggcatcttggtttgtcttgcccaacagggattctccatttactgctatcagttgatcattcacccgaagccttccatcctgggaagaaaacaggtaaaaataagtgctattaaacagactgctataaaagaagtagcttttcctttagttaataaataaaataaaaacaaagcaaaaaaaaaaaaagtggggagctttaatcctaatggattatgcccaattgaacgctggcataataacgtctaagcagctattgtagcctgtgtctatttcaatcatttatacatttgtaaatcaagtcattatcataatctgtttaccaaaatagcatactaattcaaaggacacaaagtgattactttcttgcttccagaaacacccatagaggttatttagaaaccaagacatgtaaaagctcaaggctattagacagttgcagagaactgtccccttaacaaatggccaggaaattttctctaggctgagaaatagagtaagtgacccacaaacaggggaggggaggggaaagattaacgtctactatacgcccattctgtgacaggacctatgccaagtctttgcattgattaacttcatttaactagcatgtcaatgggttgtatgttctgtgagagaaaaaatgaaaggttgaagttatggactccatccccacgtgacacatcactgatacacctagttgtttaaatgtgaatgtgggtaccataaagaaatgagaaaacttctgttaactgtatatgtttccaaaataggaacagggttgaaattaaaatttttgttaataggcatacgcatgataaagttgacactcactttagatgctgctcctccattaataatggacttgacaaagattcccaaatctgcgtggttctcttttgaccggttacctttgacactgacaccaaggcctgcagatcctgaatcattaagtgggacttcaaatgtcagaaattccctggtgccatcaggtgtaagaacaatatcctcatcttctgctttctaatagggaacaaaattgcacagcacattatagtccaatgtttctttctcaaagttatttttaaagactgctaatgagcagttccttaatcataagaggcaaaatatttccatgaaggttccacagcaagatccatgaaaacactacatctgcacccactccagaagattcttggaaccagctgttaatatttttatgtagcaattattcaatattgaaccaaacttaaatcagatttgagaaagatagagggaaaatgtagtggaaggactaaagactagtagatttctagagttcgggatttttttggtgtaatcatatattctaaacgacaagaaaaacagtaacaatgggagtaaaaataaataaatataattcatttatctccctttttatgaggaaattctgaagttatcaatatatttaatgttcactaatggtgtttattcacaaaaaataacaaatcctgatcatacaaaatcagcagaaaaaggtatatgggttcagagagcctctaaagaattctaacatcaacatctgtgagacaaagtagagatatacaacatcacagaaaacttttccacaatattgtagcatacataatatagctggtaaatattattcaggtaatcttgtttaattagttaagatttaacttcatagtcaccaagcatagaaggaagactttttaaaataaaaaacatttaggatatacaaattattgttcacctcccttaaaacagaggaagaaatgaaagcttaatgtagaactgaataaaatgcattaagatgacagcctatcattaagaaagcctacactccagaagaggaagcactcagccttctgagctcctcctcctcagcaatcccgcccatgaccaagatttccaccatctctatactggtcatgtccaaatcagtaaggctaggatgcttgttcaagcacaaactcttgctccaaccacataacagacacgtggcacaggctcttcaagtaaaaactgaatggcacatctagtcctacaacctatttctcctcctcttttcccacgtttgaaatatttctccagcatctgtttagtcattcaagcttgacttatcaaattataattgaagaataagaaatacagtggtacacagatatgtaggaatatatactttaaacagattgtgcttttacagaatgttcaataacacaaaaaaagtaggtgactgcatcctaccaaatttttaaaatgtcctaataagaataaaaatcaacccaaggaatttggaattcaaggaaatttggaatgcaaggaatttggggcataaacatgcaatctcagatgtctcaattagataaaatacattttgagagtacactatctgtaagtgaattttttagatcatcataaaataagcaatatgctatttataaatctttagacccatagtaatgtgatgtttctaatttacaaatatgtaaagttaacattttatggtaggacatctttgtgctatctcaaaggatggcctgatagtttttaaagacaagtaacacttcaattacaataaacttgctaatgggttaaaaaaaaaattaaaacttatataatgaagaactcaaaataagaatctgaaaaaatacagagtaatagtcatgttaactatgcaaagtaaatacatttatgatcaaagtccaaataaagccttaagcctgctcatcataaaaactagatttaaaatattcccaggctgggcgtggtggctcacgcccataatcccagcactttgggaggccgacgcaggtggatcacgaggtcgaagcaggtggatcacgaggtcaggagatcgagaccatcctagctaacatggtgaaaccccatctctactaaaaatacaaaaaattagccaggcgtggtggcgggcacctgtagtcccagctacttgggaggctgaggcaggagaatggcgtgaacctaggaggtggaccttgcagtgagtggagaccatgccactgcactccagcctgggcgacagagcaagactctgtcccataacaaaaaataaaataaaataaaatattcccagagaacaattttagctcaaataaaaccaatgtattgtgggcaaaaaaagatcaaatatatcaaatactttgatacaaaagtatctttatatacatgctttgctctataaacatgaatattcaatatactttttattttggtccatgtagctcaaaacaagtgtttttgttgtttgtttttttgagacagtctcactctgtcacccaaggtggaatgcggtggtacaatcactactcactacacctttgacctccccaggctcaggtgatcctcccactgcagcctccagagtagctgggactacaggaacatgtcaacaaaccgggcaaatttttgtatttctttagagatggggtttcaccatgttggccaggctggtttcagactcctgggctcaagcaatccacgcactttggcttcccaaagtattgggcttacgtgcccagccccttgaaacatttacagagtacgaaataatgactatgtgtgaatgaactgcactacctcaatataaaatctgttacaagaatataaagtacggtaaattttgatgtttaaaatacaaaacaacatcaatacacatcatagttccccttgactttaaatttggaggttgctgaaataaaaaattattctgtcaatcagtacttataagcatggaaaagctacatttgaaaaaatggaaaacaagaatattctttctatggacacacctaagtctcatcactcactatgcttacttgcttcaactctggaaggttcttaattgttactttctgatttgaatcttcagttgccttttcagtgtttactgagttttacatttccataacattttaccaaggcttacaattctcatatttttcctacttgaaagatcaggataaggagctggctgcatatatgaagaaaaattttaatcaagttgcaatattttctgattgctgaactctgaacctgttttaaagaagagcatattctccaggggatagtttatttattataacaactgcagaatgggaataatctttttcagctttcttaccaagtcttaagtcattattatcattaagaacactgatgtgaaacattgtatgtttcatgtgatattccactattaatccatttggcttttgacatagacagaaattaatgccagcttttagaacttagttctctggcagaaaaatgttttttaaaaattgtgctcttcaaaaatcatttgaaatgctatattactgagaatgttcataaagtcagatagtataggaatctccatattctgatgtaaaatagaaactaactttctatcaccttgctattccatccaaattctgcaccttatcaactgtttctcgaattaagatctttctacagaaacgcaaaaaatgtcttttctttaactcactcctcatgtcatctgggcacagtcatgtcactcaagcacacctgcctcacgcacatacatgtgtgtatacctcaagtgattgttttcagcaacaaagcctgtcagttcttcctttgcccatttctccattaccatttgttgtctttaaatgcccagaataaaagggcacctttgctaaggaacctgctgaatgggtattgtgaaagctacttactatcccaccctccagagaacagcagaaaagatgtacatttctatctgcagtgagacaaagagtcacaagtgggcaccatcatggcccccttttccttcttcccgaaatcacagtccaaaaaactgagaatagagctggcctataggcccaaatccacagttaatctgcagcaaaggtgttatctataaaaaaggaaataagagttgattgtgtcaagcagcagaaaaacaatcatgggaagggtaatctctgagccgcaacaaacgaaaatttggatgagaatgtacaaaatattgtgaagagaggcaaaagaaacatggaatgtgcacaaatgatagaagaccataaaattataggagtgagctcaatagccgatttttggctttgtaacaaaatacgtgactcagcaaaagtttcatcactccactataaatcattaatttctctctctcaagatctgcccttatctacagaattatcttttttttttttaaagacagggtcttgctctgtcatccaggctggagtgcagtggcatgatcatagctctccataaccttgaactcctggactcaagtgattatcccgccctcagcctcccaagtagctagctgggaccccaggcacaccaccaagcctgactaactttttctcttttttgtagagacagggtcttgatatgttgcccatgctggtctcaaactcctgggctcaagcaatcctcccaccttggcctcccaatatgctgggattataggcaagagccaccatgcccagctgagttattagcaaatagctagtaaattaatgcaaaaatccctagtaaattaataacaaaaagataagcagtctgcatcaaacaggaaaaggatgtaaacaagccattcactaaagaaagatgagcaaaccaataaatcaacctccaagtacaaggttcaatcttactcgcaaatcaatcaaaggttatcaaattgctccatatattttcttcaaattaatgatatccaacaaatactgctttgccatagaacactaaaaaataaataaaaataatgatatttaatactggtgtggtgaaatgcgcatgttcttgcactgctggtgaatgtaaaaaaatggtacaatatttatggaaaccaatttgacaatgcttacctaaaccttctacagtttgccattttcttaagctagaaatattacttttagtgatatggcctacaaaaatagttgtgatcatgtaccaagttttaactgtgaggatattgttttaattacaatagctaaaaattgacatgtatgaaagtcaggaaaattaagatctatctacacaatggaatgccattcagctaataaagtgtcttagcaaaataatatgtaagacaagaaagtatttgtgactaagaaattgagttttaccctttggacttccataacttccagtacacccatcaaaaacctccataacatatttttatgaattaatgtctgccttcaaagatcactagaagcttcacaaggtaggaatttatgtcagtcttcactcgtgcctggggcatgacatttattaacaataataggatatgtggctgggacatgatacatattagttaaataggtagacaagaacatctttttacttatttattttttctgagatggagtctcgctctgttgcccaggctgaagtgcagtggtatgatctcaactcactgcaatctcgcttcctgggttcaagcaattgtcctgcctcagcctcccaagcagttgggactaaaggcgtgagccactacacctggctaatttttatgtttttagtagagacagggtttcgccatgttggtcaggctggtctgaaactcctgacctcaggtgacccgcccaccttggcctcccaaagtgctgggatgacaggcatgagccaccaagccagaacaagaaaatcatttaaaaaaatacattatctttggctaggctcacagacacaaatatatatatgaaaaaatacattaaaatgatgatactgaagtcacagaattacaagtgattttaattttcttctacacatgactgaattttctacagttgatatgcattatttttacaatacaaaaaatccattgtataccacttctttaattctgcttcctcaaaaaaacactgcatgggggaggagaaattgatagagggttatacagatggtccacaacttacaatgtttcgacttaatgatttttccacttttgatggtgcccatgaaaccattctgttgttcactttcagtacggtatcccataaattagataagatattcaacactttattgtaaaataactttgtgttaattattttgcccaactgaaggctaaggtaaaccttctgagcacatgaggtagggtaggctgggttacagcgttgtaggttaggtgtataaatgcattttcatcataacaatattttcaacatagagtgggtttactgacaaatttatggggaagtaaccccatcataaattgaggggcacctggatatgatgggcaggggctgttgcttgggacaaagatgggctatgaatgagcaccttaggacagctctaaaaaaaaccatgccatgacagcagaccatcatagcgtcacgcagaatagaaattttcatagacattaaagagagaatatacttattcaacaaacagagattaaataatatgcaggtaggtatctgagacaatatgaacaaccatttatatttttaactaagagaaagattttttaaatggagaaattatcatggttttaaaatttttcttaaatttttcttaaatttaagaaccatgataaacctcttaataaaagaataaccctccaaagagactccaaaatttccttaagttccccattttaatttatcccgtatgtgagatgaacatttctgtatgttatttgtgttgatattataaagttcattattcttatcagtaaagttcaaatgtcatatctggctttataatgccttttctaattcgaatggtagatgccaaatacattttgaaagacttttaaattttttgcttggtaaaataatgctgaggaaaaaatgttttgcacaattattaatctctaatgttaactcccaaaatactcacccaatcaaagaaacatcagacaaactcaaattgagggacattctcaaagtaatctgccccttcaaaaattaaaaatttgcctggagtaatttgttcttgagaaaatattaacaaacgtaataggttaaaggagattaaagagccatgagaacttactgccatacatgatcctgaattggaaacaggaccaaattctattcatacttgtatttcattcattctctcattcatttatgatataaagaacattaattgggacaactgataatacaatcgatttaatcattttcgtaactataacacagttatataagaaaatgtcctccttctggccaggcgcagtggctcacgcctgtaatcccggcactttgggaggcagaggcgggcagatcacgaggtcaagagatcaagaccatcctggccaacatggtgaaaccccgtctctactaaaaatacaaaaattagctgtgtgtgttggcacgtgcctgtaatcccagctactcgggaggctaaggcaggagaattgcttgagcctgggcgagaaggttgcagtgagccgagatcgagccactgcactccagcctgggcaacagagtgagacttggtcacacacacacatacacacacacaaacaatatggcagcctacacttgatctattaagtgttagcaaaataaacctaataaggcccatgcttaatttctagctcattaaatttctaacttgagactctaacctttctgaagttagcctatcaagatggcttctgaccttcaaaaaagttcctaaagaatccccaatgtatccctgtggtttctgtagggaaagcccactaactttctagaatgcattttgaattcttgaaagttaagcatgtggctgggcgcagtggctcaaacctgtagtctcagcactttggaaggccatggtgggtggattgctgaaggtcagctcgagaccagcctggccaacatggcgaaaccccgttctactaaaaatacaaacaattagccaggcttggtggcgcatgcctgtaattgcaactactcaaaaggctgagaaaaagaatcgcttgaacccaggaggcggaggctccagtgagccgacatcagtgaactttgttaataaagcaagacaaatgcattctacaaataaaaacgaacaaagacaaatatgataaagaactacaaaatgggagagaacactagttccggttagggtaagcctcatgagataggtagaagtcagtaggattagaagttggcgtccgtatggacaggcaaagaaggtgagagcaggccgggcgcggtggctcacgcgtgtaattccagcactttgggaggccgaggcaggtggatcatgaggtcaggagattgagaccatcctggctaacacggtgaaaccctgtctctactaaaaatacaaaaaattagccaggcatggtggcgggcacctgtagtcccagctactcaggaggctgaggcaggagaatagtgtgaacccggggggtggagcttgcagtgagccaagatcgcaccattgcactccagcctggaagacagagcgagactccatctcaaacaaaaaaaaagaagaaggtgggagcagcccaagtcaggagaaagtatttgcaaaactggtcactgggctgggaaaggacagaagtgtccatgcagtagttaatggaaatcaatggtactaaacgcgtgttctaggaaagcctatgtatcaatccatgagcaatgtaaaaaaaaaaaaaaaaaaaaaatcaacaagatctcttcccactatcttgactaatgagatggcatctaaccctggatttctttattacttgtttatttaaaaaaaattcagtcatagtttatcagcctccaacatggaactcatactgtattacctgaaactatatatgtagcttagcttttttttttcccccctcaacatactaagtcacattaaggagaaataaaatctgccctgcagattctggtgtcagacaacctgagtttatggctggctccaagatttggagtgtcctaaggttaattctttgttcctcccctttcaataggataatatcaccaactaagtcaagcttgtccaacctgagatctgtgggccgcatgtggtccaggatggctttgaatgtggcccaacacaaattcctacctaagctttctgaaaacattatgagatttttgtgatttatttatttatttgtttatttatttatttatttatttatttatttattggcttatctgctatcgttagtgttagtgtattttatgtgtggcccaagacaattcttcttccagtgtggcccagggaagccaagatattggacgtgcctgaactaagtcatggacattgtaaagattaaataagataatccacataaagagtttcacacaataactgatgaataaatgccagtcatagataggactgcaacgttataagcaatgttaagcattagaggtgaaagaaactgtcttctattttttgtaagcctgtataaatcacatatagttcctgacagaagtaatatatctcctgcaggaaaagaaaaagaatcataactgtatgcacagttaccattcctgtggtttaaagttgatataccatggtttgctccaaaatcaaccctgagaaagcccaaaatgaaagtgagcattggacttggatttgtggtgaaatcattagtgctcccctcctccccatttctaggcattgacaaaatagataatcaaagatttcacagacctagaacctaaaacaagtcattaagaaacactaataaaaagagcaaaagcctatcacggagttttccttgagcaatactatgtgccaagaactagcaatattcaaaaagcctaaaacagatccttggccatcaaaaggtagaaaggcagagactgtgcccctgtcaatttcttaaattatcatgttaatattaagccttttacaactcaaaatgataccgcatacctggagcacaaagagaggcacagatgtgagagcacgcataaaaaattaagaaacaaataatatttcaaactaaactatacttttaactttgtttgggaaactcgtattagaaaaaaaagtccaagcgtaactagaagtcagacacatgtaaaagtatatatgacttccttttttaaggtgactcccagtcaccatgtcatgctaccataaacacacaggttgtgaactgaaatgcagcttgcatttcttaacagaataccacatcaaaagatgcttctttccctctggtgactgaggaattcacagccgatcatcagtttcctcaacacgactgactacatgttttttattgttgtttatttttaactttttggtagagatgaggtctcgctgtgttgcccagactggtcttaatctcctgggctcaagtgatcctcccaaagtgctaggattacaggtgtgagccactgcacctggccctgactacatgtttcgaaagaacatccctatctttactacttaaagcatcattttccatctcagattgtctcagacattaatagatggagtttgtgtgcaaagtcattgagttttccaaaatattctatgatacttatcctaaaccataaaggaatagctcttcccctaaggatcacattgtaaatacttcctccttttgcatttattctataactatttcatggtacagatacaaatggggtgtgtgtgtgtgtgtgtgtgtgtgtgtgtgtgtgtgtgtaaatgactgtggatctattttgttttatagatcttttccatttattttgagatatggtgagaaaaagctaacttttctaaataaatgggcaattgttataaacactacgtaaactatccttttaaagctactaatttgaagtgccatctttaacacacatgcacatacctatgcacatcatgtcagtttctgtaacccttaatctgtttaaatgatctatttgtttaaccctataacaatgccatgctgttttaggtattgtagctttatattatatatactctgccacaattattgtcttttcaaagagtagtataaattgctattgtaccccattttattatttagaatcaatttgtccaatttccccttatctaacctaccccaacacataaatatcagtgtgattttgattagatataattgccctatttattttataagccaaaaattaaagctaggaattgtctacaacacacacttattaatgtggaatattctcaaggttgtttactgattttcctccaagatgtaatttgtcacctgtttttagaattgtggaatatttataggaggatcacttgagctcaggaggtcaaggctgcagtgagccatgaaatatggtgagattctagactcaaaaaaaaaaaaaaaaaaaaaaaaaaaaaaaaaaaaaaaaaaaaaacaacgaaggaatatttgaaaaataacattagttcaaagttgcctgtttataaagctgtacagaaaatgaaacctgtttattatgttatttaaattcattatattttttctttagtcaacaatgtaaaaatttttggaaagggacatattgacattacctactatggaaatgactttgctaaattttccatttacgatagtttgagaatgaatgtttttgtgctatgttgtttgatgtaaaaaggaaaaaagatcctgattgttagaatttctaccatgtcaatataaaatgccctttttactcccatatagcgcatcatcacagagactgatagagcaatccttccttttattgtgttagttctgcctgctggaactaagcttactcttttatccccagtctgtctcaggacttgttttcttaacaggatgcaactatgtttgcattttaatgtgagctgtgagtccttaacttttgttaaattatctcttttatagttattctaacaactatgcttagcctaatactgacacgtcactttaattttcctgtgtatactttttttactgtattctcttagccctccctttttttccatgattgaatcaagttttttaacttttctttccattttgtggccacttataatttagcatttcacaactcatgaaatactttgcatatatgccaaacaactaagctttggtcctcactttgcaagtgaataggaagtctctctcttttttgcgtctatctgaccaaaattaatcacaaaatatactccatttggggtggtaacagtaagtcaccttaaaataagaccactttggcatttaataaacccatgtattaaatattacgagccaggaaaaggcaggacaagtaacttcgtattaaattagtaagaagttagttccatgtatctttccaacatctctgcatccttcaaaagacaaagctcttaccgtttcttttggaatctgcatctggcttggctctgcattctagaagaattgaagaaaaacataaatacagactgaccaaagccatcttcaacacacagggacacaatgatttattttaaagaaaattttgttgattcttaaaatccacaaaatatataaagggtaattatatgatggctgacataatgctctgtcttccaaaattttgctgatgtgtgtgtttatgtgtgtgttttaagaaatttttctagatatacatttttacttgctcattcacagtacatcatgaatttattatctggaggaaaacaagtctcaccaaactgctttcctaatcatggcactgtttctaattttgctttaaaattttcccaatcaaatcaaagttttaaggtatagaatcatttgataactagaccagataataacagtttgaaccacagtctgaaccacagctttatactttaaaatgttgcacaggaaataaacatgatttttttttcctataatgttgatttgccttaattacctaggaacttacaaggatgatttattaaaaaaaggcaccgattgataaaagtatttagatttagacacacagaatttaaacacagacaccccaaacagaggaaaatagttacgtctactggattcaagattatttttaaatgtcccctccctttaaattttcaggattttattctcttaaattttgagaagcagctgcaacatgcataatagactgacggcctactggcgtactccttaatgaaaagctcacaagcaataaattacataaccaagaaaaaaaaaaagtaggtagcagaagggaaaaacagaagcctggaagatcaaaattggacaagaagaacctgaataaccttaagctggctatatgctggcactaactctggaaaaggctgcttaagagcagtgtctaagctttggcaatctaataatgctaactagtgcactccgagacactgaggaagaattaaagcttcggcaaatcacatggaaagctagttgttttttttttttaagtgctcatttacaatttaatagagacatctccagatttaggatcaggtggcattttaagcacaaaattggataacagtggggggaaaacgaaaaactgaatttaaattgagaaataatgcattaaacatttttaaatataaagaagttttcataatttattcaaaatctacttaaaacaaaagtgttcacttttcaaccctatcactgtctgaaatttccacaaaatccacattaagttttaagacctgtgtgtaaccaggggataagatattatgactaaaattttttcatttataatatttatagaaatagtttatatagagaataaaatatagttatttttatcataacacatccatacttgaagacacaagagaatttgggctatatgataaatttggaaacctcgtttctaaaaccttgtcactctagattatacaaattaatttttgtttagcactaagagctagatgaaaaggatgtattccaaaatgatccaagtagaatctgttttgaaatatttaaaataccacttgtacttgaaataaaacaattttcttaccacatcaaaagacaaaggcaactcctccaattatgtcatttttatatataaatgaaacctagcacttttgcagaaaaccactcagaactatgtacatttaagacacttatttcattcacaccaataccatgtaaatactcagatgtattaatgtatgtatggaaagtgaaggagataggttgcaaaagttgtaaatgccttttcatttccttcatttatgtcatcctaagtaacatgacctatatttgtataattaatagccatgaggcttattgccacttaggtctttttatttttaataataatttttttaaaaaggtattccttttcatacaacagtaaggaagcaagcatctatttggcttactgacatgtactatgaaaatgtgaaatatgaaaatttgtcatatgcagtgtggaagatggcaagctttcagcgacagtctgtggagtgacagttctgaaataatcggcgtctctgtattcagtcagtccatctgagggtgtacagtgatgaacatttgatgcccttgaaaatatccctacagtctgatgtttaagtacccctccattcattactgaggatatccatttctgaaactaagggagtattagagaaaagaatgtttgtattcagtgagggctgaaagaaatataagatctagaaactcctcagaaaatgtctcaataaacatttgccatcaggcaactaacccagacccctggctgctgcatatcagaaatctttcatctactctaaatttacacaccagttcccttgggtggaaggcgtcttcctggcgaaagaccagaaggctcacagttccttccatcttggtgcttctcaacagcgaaacaacttcctcttgggatttgcccactaaatctactccatttacctaaaacaaaacaaaagttttcagctgtaatcctgtggaaacaacaggaaaacacacacacacacacacacacacacacacacacacacacactctaggactagccatatctgctatggaacataactcatttcatgcacaattctgccatgatctgggaaccactaaggttttgtgactaataaagaaactaagaccagatatctagaagagaggaagtggtcaatcttttagtgttcatcattaaacccaaagtgacaatcaccagggcattgacaagtaccaagcaataaatatttcaaaaatgtcaagttaacacaaaacttactggcttagaacagagatattttgatagccttgtgcatcataggttttcttacaccaaaataaaaaggtgttgctcttataaagggtaataaaaacacaccaaaaatattttggtacagtattttcactttaaatgaaattttactgataaatataaataaaacactttacctctaaaaggtaaacattaaagaaactacaaaacaatattttttagcagggaagcaatatttcagctgaaattttttcaatgttatgagagaattcaagcaggaaaaaaatttaaaacaacttgttcttagggaatcttttatctaacaggaagtataacatcattatcagaaagcactatatactccacagaaatgagagcatatgtttcctttaaaaggtattctacatttttctttttagacaaaaaagacattttgtccaaggcaaataagtttataacttaaattacagtatcaaaattttcctgtagttaaaatatatttcagaacatttccccttctgaaaaaaatcaacctcatatacctcaaggtactactattaaggaattgcagacagaaggactgaattcaagttccagtggagactcttacaaaataaaacaagctacgactgcacacatgggctaatataccactcaatttataccccaaggacaagcggccttttcaggaagcagaaccctaaacataatttgtactcaaacaaaagaaagtgaaaaaaaatctagacaattaagtcacttgatccttttttctttgtatgattctaattatctagacactcagagaaaatgcacgtaagtatcaatattgtatagctacaactgtagatactagaaggttgggcttaaagcatgcaaaaatgaagtttccattttaagacaaagatgacagctatggaaataaagcctaactcgaaagacatgcaggttgcaggtctttctcactgctttaaaataaaaaggtttttctgatatgttgaaagtaaagcgattatgtgataaaagaaaaaagtgactcaataataaagcaattatctttagaaagaaagacggagagagccagaaaaggacagatatttttttggactcagaagacaggaggactgaattcaagtcccagcagagactcttacaaataaaacaagctacgactgcagacgtgggctaacgtaccactcaatttataaccccaggacaagtggctttttcaggaagcaggaccctaacataatttgtactcaaacatctgttatttagcttctaacagtgcctatttaacatacgttgtcacatgcacaggaccaaaacagtgggaataaaatttaagggatctaggctccaaatgtagacatggaaaaaaatacagacggtatccctctcctcccctactttacaaaaattctttaggagaactcaatctggagagatagaaaccatatatgaaactataagaaaaaaggatagtgtggtaaaagtttaccttagcattaatatttgaatactagttaattaggaaatgcagtatctgctaataaaaatacagactatattttctttaaaaaaaactaagaaaaatggtttaaaacatatttttcaattttctcttttatgtgcaaaccatcacacaaacacaaattatgtatgttaatctatttccaaggcagcttcaaataccaatgaacccaaactcataagacatagaaaaaaaattcaaaaacgatttttcttttctttcctgacatttgactcttatgactcaatttattctccatgctgccatttcaagatttccttgctcctcttatcaaggaacactgttttcatttatttcatctgtctctgttctgaatacatttccacattgccagacataaatataaagccatttagaaacgtaaccttacagacattttatatgacaaaatgttacctcataaaccaaatgtctgagtaactaaaaatttataactaaactaaatggggctgggcatgagggctaacgtctgtaatcccagcattttgggaggccaaggcaggagttcaaggccagcctggccaatgtggtgaaaccctgtctctatgaaaaatacaaaaattagccaggcatggtggtgcacgcctgtagtcccagctaccaggggggctgaggcaggagaatcacttgaacccagaaggtggaggctgcagtaagctgagattgtgccactgcactccagcctgggcgacagagcgagactccatctcataaaaaaaaataaataaataaatggaaagataatttctcatcagataacatggaaaaaagagctgggcacgatggctcacacctgtaatcccagcacactgggaggcaagaggatcgcctgaggccagcaattcaagaccagctggggcaacatagcaagactctgcctctacaaaaattttaacaattaaaaaaatatatataaaaaataacatggaaaatctaaacataaaacagaaacacattttgtgacgcatacttccgctaaaatgtatataactgaatttcatattttatgaaaatgtttttaaaagttggctcctggaaatggaacatttcaagaatcagggaacatcctgctggggaagtcacttacctctataagtctgtctcctgccttaagtcggccatcctgaatggccgccccccgggggagaatgtttttcacatagattggagctgagccacctattgttacatctctggaagtgatgctgaatcccaaaccttctgtacctaggtatgtgaaggagaagaaaagtaaataaaatgagatatcttgaattttacaggtgtattgcaccagtatactcaacctcaacttgacattttgtaactttcacaatggtccacatttcttctactactttaaaagttgtaataaatttttcaaaatagactaaattgtggaaggtttaaatggtttacatatcaacagttattaatctaagaagaaacagcaatcttctcaaagacagatgaaagttaatatgtaaatatgactgctaaaagtttttaaatcaatgtaaatctttgaataggaaattcactacatgaagaaagaaaaaaacttctgttaagacccacagtacctcaaaactcaagtattattgtgcaataatgacatccaaattttaagggtaggaggtatgagcaagggaaacaaaaatgtccagggagatggaaaagaacagtgaaatgagaggtatctctagatagaggtaatggaacctcccaaaatcataattattcaaagcagtttactaagaggataaaccataaaccaaattatctttgcctagttcacttctaattcacctaaatcttaccatgtatatttccttcaccaccccccactcccaaacaaggcaaattactcagtgaagactccatctcagatcatggctaccaaatctggggatcatattatgcttaaaggtactaaattaatgatgcatttataaattactctgatgattcacagaatttaaattctcatttctttggcagctttcttgacagacagtcttacatgctcaatacaaagcagaaaagtgtttatatgtcactagaatcaagacgcaagaagccaacacgtgcccaggaaaaactggggagataatgatacatttgtaatgaatcacaacatttttacaataatgatttctacctaagcttttttaaaaagttacttcttaagatattagtttccatttcagttaaaatattgttaaggcaaatgcttgctcattatgggaagaataaagagatctgtaaaggtgaaaaatctagaaaagagcacattaatctgatacatcactcagtataaaactgtaatgaaaagtataaaatataagtgaacaaaaaagggtgaataaaaatgtagattaaagaaacattaaaggagaaataaagaaaacactccatagttattcctgtagcaaaacctaccatagttattctcaacatcaaacaaagcattcatttactttagtctgaagtcactttagggtgcttggactattaatatttctgatgtcttccatgctgaacacctgaatggcatactgtctatatgaaatgtttgttattgctctggggagatttttccatatgtctctgctttcatgaaactctaatgacttgcaataacatttattaagaaagaattcttaattactctccttttgcaatactaacttttttgaactatgaatgctgactgttgtaggaacctcaatactattaaaatatcagcaacaacccctaaatctgtaagctaaaagttcaggcaatgacctttcaaggaaagataagtagatatcaattttcatttaacaaagccaacaaaacattctgcactgactgaaacagattactgaccttctcctctgactttattaaaaagctaatttctacaaaagagctgggtatttgagaataccaaaatggcaataaatattaagaaatcataattatggaagcaagtacactgaggctattctgttgtcatgttatataacatagctccaaaattaggccaaagaataattatactgacatctttttttgtactaagagttgattccagtttttgaagaactgctgccactcaaagcacattagctcactttgaactgaatctgaagtttaacactgacacaccctatgtttttaatgtacttcactaataaatgtaataacttgtaagaaaaaaatctgctagctacaaggaaagcctgttcaattctcctacattcattattattaaaatatatgcatttagtcctaatcaaagataatcagcattcttccccacatttatagtaaacataatttttatataaaatatttgtaagtattggcagcatgcacaagcagcatgtgctttttgtcatacattctcacagttggtaaattaaaatcaagatagatctatgggactctatatcattaagattactcaaggtctgaaaaacacttaaaaccattgtttctcctttcagtgattaagcatagtctttctaaattagcttgtgtaaatgcaatcatatttttcattaaatgctattaaaataatatctgtattcaaaacaatggtaccagttttgtaagtaaaatgtatcaatttgatttatttatcacttcagacttactataacataaaaattagatatactcattattttcctttttttggagaatctgtattctgtttaatactttacctttatcttctcacttcagatttcctttgtatttctcattctttcattagcaaaacaatggtacttttaatggcaaatcacctcatttaaaaagttcatgttatatcatgatttgtcaaatatcctaatttttgaaaaaccataattaactaaatgaatattgctgtatcagtgtaaaaaggaaaagatatttatgaaccagtatctttatgacaatggtgaagcaaaatactgtacctttgtttagagatatcaagcagaattttattttttatacgattctatttgtagttcttgatatgtttttggttaaaaacaagggcctgtcatttaagtagagcaaaaggaggaaagaggatgtgatatttctctcatttaggaattgacagagctaaaggggtttctgttgatatgactctgtgtttgcaacgaggcaagctgtcaactcctgatcatgtcaaccaagtatttagagcttaaaaaccagtaaccagaaataagaaacttgaggttcacataaagttcactgaaagaatatgagttagaaaggaaacagcagtctcagagtttacaaccttgtaaatgctaccccaaatgtaaagaagaatggtctgaatatccggatatggaaaacatactagtaagaatctgtggccaacagccacatgacctgaggaaataatgaacctctcttggaatcatttccatccaactataagagttgatggttgagcctataaaaaaaaatattctttataataataccattttgaaagacatgatttaaaaatatatcaaaatgctcagctaaaatggatcaggaacagtaaaagtgtatcttggtgcctggacgaaacattgggtgaaaatcataaagtcaagtccaatagtttgcactcaactttgaaggaggcaaactgcaagaacatgctctctatacagagatccactgtatacaggaagggtactaaaatacataatggatggaagatgtatgaagaatcggcaatcgacatcatgacttccacatcaccataagaaagagaagcaggcctggacatggtggctcacttccataatcccagcactttgggaagccgaggtagaaggactacttgaggccaggagttccagatcaacctgggcaacatggcaagactccaacacaacaaaaaatttgtaaatgagatgggcatggcggcatgtgcctctagtcacagcacttggaaggctgacatggggtgttgcgggctacggtgagctatgactgcaccactgcactgtagcctgggcaacaaagaaaggccctgtctcaaaaaaaaaaaaaaaaaaaaaaaaaaaaagaaagaaaaagaaaagagaggaaaagaaaagaaaaaaaagaaagggaagtaatgcaataatacaagaaaacaaaagacaagagtcaatggcctggcttctcagcaacctactataaactcctggcagcctcaaacaaattggtccctccccacatcaaatactgagattgacgtgcactacctctaaagtcctccttgagggctggacttatacagcaaatggggcagtcaaaatggtcaaatccttactattgttctgcatttgatattaatgtcctgaagccattttctttcacaatcaaaaattttactacagtaactgctatcttcttctcatagacatagtcttattctctgcacttttacattttaatttctacagagcaaaataaacctgagacatataagaaatacaatttgaaatatgttaaaaggtaagtaactttaaaaaatctatcagttctttcacaaaataattagataagactcagggtgctttgggttagtaggttgacttttaaaataaattccatttctacccttgtgtgttgctgctaagaaaagaaattccacaaaacaaaaacaggataggtcgtacctttcttaagctggatattaagcctcttgcctatttttttggtgttataaccactgcttacagtcgtactaaatacattctgaggtgccgaggctggagcggatggtggttttcccgaggggtgtgcgctatgaggtagtcttgagtgagagtctatctgctcaggcgggtggttcagtcggggtgctctctgcaccgtgtgaagccctgcactgttcacactcctgttgtcaatatactggctgtcagggctaaaacggcttgaatagtaattgttcttctcactttgggatagttgttcatactgctctttatttgctgcaggaaccacatggaaccaaatgatgggtgtacgcatggcttggcgaaacatatgttgtgctctgggtttgagaaagaatagaaaattagcaaattaagactggcagactagaagatattatgagcttaattaagtttactaattaagcaataagaactgacaggctgttgaaattgaaaagcaaaattctaataacccatttatcaatcaagtttgcagctctgatctatcaatagctgtttcttcaaatataaatttctcattctctcaataaaaatagaaaaattatctacaactacagataaaattctgtcctctcaactgtaaatcattaaacatgttttaagtataacaagtattataatttcaataatagaaaccaaatggaacattctctctacaacattgtctaatacaacttgtagacattacaaaatacttcaatttaagttttcaaagaaagacagagctttataattatatttagaatattggattgggttagatgtgtatttaaaatttttaaaatacacacacacacacacacacacttagaagactatagaaagtaactattaattatttattaagttggtatatgtaaaaatctcaagaacagcaatccaggctcaataattcaaaatgttgacagctgtgggtcacagtgcacccatacaaccagcctgggaagcagctctttctcatgctggttccctggtcaggacctcaagttcttaagagttctgtttgctcctgccttgttttataagaactggccaactgttatgtttttcattgactaagggcctgaatcaagataaagtgtatctgaatacaacccaatattgtatctgaatacaacccaagataaagtgtatctgaatacaacctcaagcagatacaaacagctttatctgcttgtttgtatctagagaaactgtgtgcagcaaaggtggacgggtgagttaaagtatgataaaaatgggcacactgtcaattttccaaaaggagaggaaccagcaaaattgtaaagttgaaatgggggccataatacttaagaagagctatatccatcagaggacattttgaaatatagtctaatggtattaattactgagtatgtttaaatttttaaaagctaatggcagaaaatattcctctccagtatacagactgagatcacagacatgtttgaagcatttcaactgactgcactctgtcatgcctaatgcaagtaagaacagaagtgcagcgagcacacacttactgttcaaatcttctatttcgaaggtcgccatcattaatcctgacaatgcaatcattctcacgaaaaagattttcatgttcagctttaccacctttctccaatcgttttactaataaccccagggttctggaacattaagaatgcaaatgattacacatgtaatatctccaccatgcacactgccttaccactttaatgctgttattatatttacaaagatgtccttacaaaggagcatgttaaaatgactattcatacatttttaaatgacagacaaaaaccacaacgttaaaatgacatgtaaaaatgcatcccttccataaatgtaaaaaatcagtttctggctggtcagtattatgtttctagaacaagctataacactctctctgtttacaaatgccccaaacagagcccgcctaatggttgagtgggtattgcagtgtggaggatggataagcatgtatttttgaatggcttgggcaattttctgttttaagccagctggcacgctagcttaaaagacgactgcaactcccatctttctgtgaaagtaaaggtaatgaggaaaagctaacctcattgcactgcaggtttgagaatgataataggaaagatttcaggaataaaggagtttccatgctttgcatttgaatttgatagtgcttagtattgtgaatttcaaaacctgtcaggtctcccaaaagtaagtcatttattgtcaatattcccatttggaaaaacaaatgacccaacagaaaaacgtcagtgagaggttcaaataatgccaatcaccattcatctcttccacatatgtactcactcaggttgaaagaaaagtgtgaatgacctttgagagaccccctacttgctctagaacactaacttcataactgacaggacattctatacagactgggacaaataagaaatacttctttaaatcacagtataagcaacaggggtcttaacctagctctgattgctgttatttttatttttttagtcttattttattcttttttgagatggagtttcgttcttgtcgtccaggctgtagtgcaatagcatgatcttggttcattgcaacctccaccacctgggttcaagcgattctcctgcctcagcctcctgagtagctgggatcacaggcatgcgccaccatgcccagctaatttttttgtatttttagtagagctggggtttcaccatgttggctaggctggtctcaaactcctgacctcaggtaatccacccgcctcagcctcccaaagtgctgggattacaggcatgagccactgttaattacttgatggctggcataaattttgtatcatgatattaaaatttttatatgaacttagtctttttacttccaaaatttgtattttctttcataatcctaataaagagacaaaaatgcctacacaggcactaaaattgagaatccagtataaattaaaattgaagacaccctaattttcaaataatgtctaaatgatttccaagagaattacaacttgcagtcatctgtgtatgttttccagtagaaatataccaaaatagatagctgctgcttctatacttttccagtaattgttgtatctgttccatgggcatttatcatattcttctcttatatacataccttatctctattagtggactataagctcctagcagacagagaacataagattcagcagttcaagcactgaactagtagtaaggtcttgataaatgacaactgaatgaaggcatgattgaggttagctgaggcaaacaagtctatttctataagctttttgcaaaatagaatacaagtgaatagaatttagattcagattctttcttcatgaaagtatcatttctactaaagatatgatgaaactgaaataaattaaactcagacaaaagtcctatttcacttgtaattttgcagtttaacatttttacgatattagtaaggtcaacgattaatttcattctaacttttattaataaatataataaggtggcattatactagagtgaagcctatcagcttgcaagaattgtaattttagcgttgagaatcagcacctactagtgtatgagtctaaaaatattagtgactagtaaaaacaatattatgtagataatatttagttacttattatcatttattgcagctatataaagacataaaattatctcaactcaaaggtaagaataaagtacactgatttatcttcaggagcaacttaactctcagttcatatttgggagaaagagattccataatatgccaaaccaaaaatgaagttattgtttaaatgtgatcatgtccataatttatctccctaggattccctattgtttgtttctatctgcaactgaacaaagtgttctatcataggaatcaaaggaattattggctgggcacagtggttcacgcctgtaatcccagcactttggaaggctgaggcaggcagatcacctgaggtcaggagttcaataccagactgaccaatatggagaaaccccctctctactaaaagtataaaattagcttggcatggtggcgggcacctgtaatcccagctacttgggaggctgaggcaggagaatcgcttgaacccaggaggcagaggttgcggtgagccgagatcgcgccactgcactccagcctgggcaacgcaaaactccgtccaaaaaaaaaaaaaaaagaattattaagatatatctatgattccgatgaatgaggaagattaatacaagaaattaaattaaatcacagttactggtaccactagaacatgcagaagatatctgaccacttcagtttcaaagaacatcttgaaggaaacgatgtctcagtcacccacaggtaatcataacagaaccacatgtgaggtgccacagctgtagttaaaagccaccactataaaccagacacactttggaatgtgtatgctttcagtccttgcaataaaaatatgccctaccaagactcactccagttaatgagtttttaattggtgaaatcataagcgatttcccaatatgactacaatattactgcaaatgtaagtgactaacaattagtatgtttttatgtattatattttgtgtaatctaaaatagtccatagaaaatttttacaaaaaatatatatataaacggtcttcaatggaaattacttagcagttaattagcaccgatcatttatttaaatttatgaaactatcttggatacatcctttcagtatttatgacaacttaaaacagtgtaacttataaatcctttcactttaattttttttgagacagaatcttgctctgtcacccaggctggaggtatactgggctcaatcacagctccctgcaagctcaaaccccggggctcaagcaatcctcctgcctcagcctcctgagtagctgggattagaggtgtgtgccacgacccctggctagtttgtttgtttgttttgtagacttgggttcttactatgttgcccaggctggtcttgaactcctggacttggcctcccaaaagtattgggattacaggcttgagccactgtgccagctgaaatctgctctttaattctagaagtaacatcaataatttttttcagataagtagatgaacagatttatattcatctcataatttttcagttttaaacctatgtgttttttttctggtaatcattctagactaataatccaaagtagaaaagcatgtaatgttccatttcttgaatggttgtctttctaaataagtcctcatcaatggccaaatgcattagcaatcctaacatacagtagaaattctacaaatcataaatacaccacacacgtatagaaactataatggaaatttattaactgaggctttagcaaccaacattgttataagtcatgaaaatctcagatctcagattccttttactcagtacaagagacctgatggggggctgggagatagagggtggaagaagactgcagaagagaaagaacatcaccctgactgacacagcaagagatgagggaatcaagggaacagactgaattaaggtgaagttagtagcctgctgatttctaagtacttaaccacactattagaatcattctctcaaaaagaatggattaatttaaaaggaaagtggtacaatctgcaaaattatctcatttactccactaggtgaaaatgattgcaaaggaatgggaatgaactatcaaaagaaaaaaaagtcacaagaaaatccaactgataacagctagactgagaatgaaaagaacctccgaaggaaatcaaaagtagtaagaagagacactttcctgaaaaatgtgtgctcgcgagcagatacatttccatagccctcatttgcaacttaaagctgtatcaaacaatataattaaaaacaaattttagggatatattttgcaaactcaactagaaatcagaatttgttctaaagtaataaagaaccaactgcctatggtatggctgctgcaacagttttattagagaaagtaatcaaagcaaatgaagttctaaacattttggcacgtcagtgtgctggtagagagaacagtgttccttcttggcagctaataccagaattccttattgggtcaaccatgttccatcctaagaagaaaccactttgcaaaaaataaaagaggtaggtgtcaggaaaggaggcattggagtaagctctgtttggggaatggttccaagagcagaacaaccccagatttgttatgctaggacaaaagacataagagaaaagagttgggcatttattagtggggtggcgcagatttaagaagaaatgattatagggtttagggttatgtgaaacagaacctcctctaccttccttatgaatctaagataaaccctacttggctttatgcttttcaagcaaatggatttttcctgatggagctgaaacatccccaaatctattcctcttctagtctcctatattttcttcaaaatttgaaaagaagaaaacactagatccgctgcatacaaatatcacttctgaataattttcctaatacaaaagtatgttacatgcatatttctttcaagacttcgtttttgaacaatgtttcttaaaaaaaaaaaaaaaaaaaaaaaaaagacaagctagggtacagtagcacaaagcgagccattgaaatgctgcttctttgtacatgattttggatgcataattagaatttaactacttagattatattaaggattgcaccactacatttttacaaggttcattagcctaattatacacttaattaaaacaaacgcagtcacacatgttaacattttcaattctaagtataaattacaaccaatgataaaactgaaaataagtaacaaatgttttattgacatccaaattggctgagtaagtctgagttttgcgttgataatgtaaactaccacaactgccacccagctgtatggaaatgattataattcatcttaataaaggttgacacagtataaacatcacaacggtagggaaggcagaatatgagtgggcagaatagggtctcatcaacaagaaccgctcagctccctgagtacagcccatggggggccagcaactacctacatgagcccagaaagtactgccactgaaagcatggacaccaaaaggagaaagtttaaaggaatgccaagttaaaactttaaatcttaattttttttttagaaaaacttcaatgaatgagataaatcaggccaaaaaggtaaataaaaatggaaaattcctttagattacagcagaaatcacagatgtcatattgctatatataaagagacatgattcatgtaagtgtaaactgcaacttgtctctctaaaaccaatgcgtatgttatagttctttattataacaaatgagtctgcggctgagaatgcacaattgaaaactttcagacaaaagactattgattcagcaaataaagttaaattgcgtttttttcaaaagttattaaattaaaattgagtactcaaaagttcaagagcatatttattctcagctagtttgtgaagctcaaattgactgtaattcttcattagcatatgtacccaattaactaaacaaatgtgtattgggattctcaattttacgacataatagtaaattttctcccagattcatgatataagaggaaaatgatcactttctctgattgggtagactaatcactacctacctagaataccaagcaccagaataccaagcaccactggagggaatttcaaggcacataacaaaagataaattgagtataaaatctcttctcatgatttgatcattcttattagctgccactgccaaggaccttgctaaatgatttacatatattttcttatttaaaccatacaaaagtcatgattcctatccttcatatgtaaggagtagggctaagtgaggctaacttgcccaaggccacactacgtaaaaaatactgagcaaggtatccttccccagtcctgacaatccccgtgccaataaaacgaggacaacataaggtcaagtcagtcactgactgacacagagaggtaatacaaaattcccaactccaaatctggggaaaataaattgcgttttcaatacataatagagcaaaaaatgataaagaatatcttagatgaacaaaagggtataacaaacaatatagttttttttgtgtgtgtacacatttagttttattgtaacaaagcaacttgtacacttttaacgtttaaaactgagcatcatctttcctttccagcgaaacaaaaagaaaatttaaaaatatacaggaacaaaattacaatagagaatgtcaattccaaataagatcctacaggttctgctgactcccccattgagtggcagggctcaagtcatcattaggacagaatttattttaaaagtgtcatcttaaactgcaaggatgtctgtcaaatatcacaattaaacatgccaaaggagaagccatgttgtcaaaatgcccacttaacccacccaaacatctcaaacccaccctttgctgaccttctataacctcattttttttttagttttttttttcttcttttaaacaagagaaagtagacagatacatgttggtaaatgctaactgtccatattcacatagagacacagtgtactctctgagcccaatatacagagaaaggaggaaaaaagctagaattctatgcactactgcacaggggcctagcgccctccagcttccagcagagcgaagggagaaggtttttcttttttcccacagagctcggtggtgttgattccatacagtttttgttcagacaggaagggataaaaatgacaaacaatataattataatcatgtaaatcttagttgaggggagagtgaagctcagattctgctgaattaaatggatgagtatggtatgtctcaagaccatccaaagatgtttgactactagtcttgtagacagagaaacatcagtttatatttgagggggaaattattcaagacatgaatgcaggatgtaaaaaacaaacttttatatttcagtgattttctgaatatagattaattacaaaatacaatctgcatatagattattttaaccaccttctaattaatctatattcaggtttaaatagaatgcaaataataatacttatgaaatacatattttccaacagggtcacttttatttcaactcaaaaacgcaaaacattaaaaatattctcctagtggccagaagtgatggctcacacctgtaatcccagcacttcgggaggccgaggtgggtggatcacttgagctcaggagttccagatcagcctaggcaacatggggagaccccacctttaccaaaaatacaaaaaattagccaggcatagtggtgtgtgcctgtggtcgcagctactagggaggctgaggtgggaggatcacttgagcctggagatcctgccaccgtactccagcctgggtgacagagtgagaccctgtctcaaaaaatataaagaaagaaagaaagtaaaaaaaagaataaatcaattttaaaaataaaaaatattctcttagagatgtgatttcatttttcagcttcatgatggaatttatggacaataatgtaactaagcaaataaataaagaggggaaaagtcataaaaataaactttaacacagaaattgaagaagctttttccaaaggatgttgacacttcacctgatattctgaatattgtattgaagataaacagatgaaaaaaattatttgggataaaaatcaaagttaatcagacaaatcaaatgatggcaaatctgtaaaaagtaagttgagaataaattaataaataagatatctgccaacatgagtcagtagcagaaagccagacccacacccagagtcccttcatttccctcaccaccatcttcacagggcctgattttctaactgtgaaactttagatttttccttaagtcttatgattgacaagtagatgttaagaaggattgttctgtgagtacatactactaatgagagtatggtaaatgggcttatatggtttttttcaacttcccttcttcctgagaatcaaggacatgcactgctgggaattaatatgtagttacaacaaaagaggctttcttatcaaacagtaagtggaaatcaaaatcctgtacactcttgtcccccaaagatatgaatagaaaacagaggtgaagaagttttagacatgaaaaatactagaatgtaaaaccatcatggcagccatttttatttgtttggttccctagggcaagggctgacaactgcagcctatgagtcaattcagccagcaatatgtttttgtaaatgaagctttgtttatatcttgtcaatggttgctttcatgctacaatggcagattttctgggccatgatgcctaaaatactgattatctgaccctttacagaaagtttgtgaatctttgatctgagatatcaaaggcaccaaaaatgctaactagtagatactagatcttaaaaaaaaaaaaaaagtgtatataaacaccaacatacaattactattttcacaaggaaaagtaatgtgaaacaaatttaagtgccacagacttaagaataaaggtagatgtaaataagtgagaaatgtccattatagaaaagatccaggccaggcaaggtggctcatgcccgtaatccatgcactttgggaggacaaagctggcagatcacttgagcccaagagtttgagacgagactgggcaacattgggaaacctcatgtccacaaaaaatataaaaaattagccgggcatggaggcacttgcctgtagtcccagctgcttgggaggctgaggtggaaaaatcacctaagcccggcaggttgaagctgcagtgagccactactctccagcccgggcaacagagtgagaagctatctcaaaaggaaaaaaaaaaaagatccagagaagaaaactttaggccaggtacagccgctcacacctgtaatcccagcactatgggaggccagggtagcaggatcacttgaggccaagagtttgagaccagcctaggcaacaaagcaagacccagtttctacttaattaattaatttaaaatgttttagccataattgttttccataggggaaaagatttagagtatctactttaagttagattatgaagcccaagtaagaatagtagtaatttttttttttttttttttgagacagagtcttgctctgtcacctgggctagagtgcagtggcgcgatctcagctcactgcaacctccacctcctgggttcaagcaattctcctgcctcagccttctgagtggctgggattacaggcgcacatcaccacgcccagctaatttttgtatttttagtagagatggggcttcaccatgttggccaggatggactcgatctcttgacttcatgatccgcccgcctcagcctcccaaagtgctaggattaaggtgtgagccaccgcgcctggcctatgcctcagcctccagagtaggtgggactacaggtacccatcaccacacctggctaatgtttgtatttttagtatacatagggtttcaccatgttggccacgctggtctcgcactcctgacctcaggtgatctgcccaccttggcctcccaaaggtctgggattacaggcatgagccaccatgcccggccttattttgtttttgtttaagacaggttctcactctgccatgccaagctggagtacagtggcatgatcatggctcactgcagccccacactcccagattcaagtgatcctcccacctcagcctcccaagtggctgggaccataggtgtatgccagcacactcggctaacttttgtattttttgcagagacaaggttttgccatgttgccaagactggacttgaactcctggcttcaagtgatccttccacttcagcctccaaaagtactgggattacatgaatgagccatcatgtccagcctcaaacacaaaatcttatcatttcataggtccagtccctattttagcacacaattttatatgttgctttttatatacttaacattatatcataatcatatatctatttcatgagaaagtgtcagaaatacttcttaaccaccatccaggccaggatgtatcattaccgtttctttgttaatatagtaacaccatatctaatatggatagtcatgggttcatttgctcctgtgctgattacgcttcactaagcagtacctatggtcctgtagaccaatacctacaaccaggttctagaaatattaaaaaagaaaaaaaaaaaagcaaggttcttctgccaaaggtaatcacaattatttggcataaccttcctgaaaatagtggcatttgtggtttaaataaagagattatctttcctatttgtttttgagacagagtctcactctgtcacctaggctggagtgcagtggcgtgatcttggctcactgcaaactctatctcctgggttcaagcaattcttgtgcctccgcctcccatgtagctgggattacaggcacctgccacaatgcccagctaatttttgtatttttcatagagacagggtttcatcatgttggccaggctggtcttgaactcttgacctgaagtgctccacctgcctagacctcccaaagtgctaggattacaggcgtgagccactgcgcccagccgatggttctcatttaaatcaggaggaaatgaaatgatatggatgaaataaaaattgattccaaggtaatgaaacgttttaggtaaatgtttttctactaagaaaataatttaaaaaaagaaatcaccaaagtaatgaaaccgtgaacgaatatagatgaggatcagttaactttatttttgaataacatatacaaggaaataactcaagaaaaacatcatcggccgggcgcggtggctcacgcctgtaatcccagcactttgggaggccgaggcgggtggatcatgaggtcaggagatcgagaccatcctggctaacaaggtgaaaccccgtctctactaaaaatacaaaaaattagccgggcgcggtggcgggcgcctgtagtcccagctactcgggaggctgaggcaggagaatggcgtgaacccgggaagcggagcttgcagtgagccgagattgcgccactgcagtccgcagtccaacctgggcgacagagcgagactccgtctcaaaaaaaaaaaaaaaaaaaaaaaagaaaaacatcatcatggggaagataatattgtctctctacctatttgtctctatttctacatatcagcaggtagtcaactaagacaggggttggaggacgagctaattgtcattaatgcccctgattgaaaaacattcaacctagtctaaaaaatagctttgaaagtaagcagtgcaagattcttattttaaaaaacttaagccagccatggtggctcacacctgtaatcccagcactttgggaggctgaggccggcggatcacttgagatcaagtgttccagatcaacctggccaacgtggtgaaaccctgtctctgctaaaaattcaaaaactagccaggcatggtagcatatgcctgtagtcccagcttctaggaaggctgatgcaggagaattgcttgaacccgggaagcggaggttgcagtgagccaggatctccagcctgtgtgacagagtgagactccatctcaaaaaaaaccaaaaaacaaacacaaaaaaaccaacaacaacaaaaaaaacttcatcacacatcaggtcacaataagatctacatggctgtaaaaaactctctaacgttaacttcacaagcttacattactattttccttaatgacatttgatatttgaggtggtctgggttgtgttccttctcttcaaaatatacaattggtattctgcattattcgttagatgctctgactttgaaaatctaaatgagaaagcaatattgacatgtatttgtcacttttataaaagtaagtattcagtaactgttattcaattagttatcctccaaaattgagaaggcccaagaatgactggagttttatataagggaagttatcttggaaatttctacttacatatcatgaatatatattattgtagtcctactagatatatgtgcaatttcttaacttcacttaatttcttccttcctgctatactacattgcttaatttactcttgcacaagccaccatgaagttgacacagctacctttacaagctatcatcacatttaaaatcatcttccgcaacaagccattttcagttgcctaattcagactattcttcccctatcagctcacagagcacctattatataactatatcaacatttatcacataattataattgtgtgatttcttggctatcactccgtctagactgcaaatctctggaggaagaacatattccgttcatctttgtttcctagcacctaacacagggattgtcacaacagaaatgcttggaaaggtttcttatgaagtaacaggaatccatttccgagcatttctgagaatgaggaaggtggggatctctgggttcttggagatttgtatctgtcaatctgaacagaccacctactttttctctcccattgttaaccatctgtgaggaaccatgactatcaattccacaaagaagcttaaccatgcaacacaggtattggggaatcacaaactatttctgttctgcttccatatgaaaattggtgatgcctaagaagaggttataaagaatctgtttttcttaaatctctttgtctctttgaaaatctctgtgcacgactttcttcattaagtgccaaactaatagggcttaaaaatgactcagctataaaagaacttctagttctgcaaagacatacttgttttcttgaatctgtttggtgtatcaaaactaaatgccatggtaaccagaaactgtggtggattttgtgaaatgccttcctttgacttaatctagatagtaagtttatttttccatcttactctccatttgctttaggcttttcatctgttcactttaccctaatatcctttcacagtgaggtagaaaatacacaataaacgacagaaaatatagtaacatgtaattgaaatgctggctcaaagctggtacagacacaattaaatctcatttgtgatgagttatgtttcacaggcattttaagacatatgcatatcgggaagctataatccatgcattttaccttatcttttttttcctactccggaaagaaatgaaaacaaaatttaacttttgaggtaatttagaactcaatttcttacacgaaataaaggcaaggccatgttgaaaataatattgtttaactataagttatttgaagaaattttaatgcttctctaaagttaaaaaaagaattttaaagagaattaaaaagtaaaagcagccacaactctatgaatataacaccacttgaaaattcaaggtgaatgttataccttgttatgtaacactaccattcaagcctcattcatactccagcagagttctaagtcaagtttcagctttagaacattgcatgaaccatgagagatgaaatctgaactcaccacagttacttacaagtaacaagaaagtactaccattgttcaaatactcatttaaaaaaataaaatgcatagtttaatcccacacatctatcttctacaacaccctagatgcctgtaattacttgacaacagtttaaactatgttctacggtctcagtcactgctataagtctaccctccaacttccccactttttcgcaccatgtaaagaaagttaaaataaaaagaaaaaaaataaggtgatagcaataaaagaaataagttaaaaattaaaaagccaaaataggtcattagagagcaagtaagagaagatgcaattaaattaaacaagttaaacatgcacaagttcagactcatgggaaaggatgcggtgcacctcacttgtctgtgacagaggtctgccaagcctttgttggaaaatcaattcatactatttgaatacattaaaaccaaaaatatcacaacagtcctttcacacataaaaaggaacagaatcaaggaaactgacataacatttgaagtttttaaggatgcatgttctgtaaagtaatgaagttgagattaacaaacagtacatgatttttagactcaaggttcagaaatctatggcttgcctaattttttaaaatttcatattaaaggtttttaacaataaaaaaactcataaaattgaagaactaaacacaaatttaaagcttaaatcaaatttaagtcatctagataatttttattgcattaagctttcccaaaaaaagtgcttttaagctctccttaacgttgcaaattcatctggagttctgacttgaaagtccatcatcaatttacagcaaagtaaaatgtttgcttgagtgtgatgaacaataaatttattaggataattcaaatgcagtttcttcacgttcctgcaaaacctctcttcatcaggctaagtgctttctgtgattatgacatatatataggaatgaaggagcagttgcctccaaatgagaatgtttcctattaagcatatgctaagtcaacaccactctctatctgagcataaatgaagataaaacactctacattatgattcaattaaaaacctccaagatacgttacctgccgcctcgagcactgaaaggcactacgtggattcccagaggccctccatcgttggggacttctacgagctttaccatatcactgtgagacaatgatgaatgagggagcatgaacgtgtactgtaaacaaaccaaaaccaaaacaaaacaaaacaaaaaactgcaacaacacagacacacaataaacaacaaaagagaacagaacaaaaatcccaccaagtgcataggcatatatatacatattctggaatataagcatggtgatgaaggcaacattaaacactacatacctgaacactagtctgatggcatggagggagagcaatcatcagagataactacattaaaatgacacagaacatttctcttggaccgaccctattcttctgtgtaatacaagtttatgtctttcaagtaaaatctttagacttacactgaaactcttccatcccaacactcacgtcaaggactctaaagattaactgaacaaagatgttgcagctaccaaggactctaaagattaactgaataaagatgttgcagctacagaacactttctaatttacaaagtgctcttttatatgtcacatcattaatccttccaataatccaatgagaccaaagttttcactcctgtaagtgacagtccaagggagatcaccattgtccttactgctcactacttcatgacaattcaaagtcactatttcctaaaccgctataagagtgctacaagtgcagcttacaaaactcctttctcaaagccaacaggcatctactgcaaatcaaataattttcataaaattgctcgaaattaattttctttttagaaagggagtcttgctgtgttgctcaggctggcctagaactcttgtgctcaagcaatcttttcgccccagtattctgagtagctgggactacagctatgaagctatttatattatatgacataacatgaagttacttctattacaaaactattctgcataaggaacataacgttacataatgtatggatttgtcaagtctatgaatctttactattaataaaataaagcctgagtttaatgaaaatttgtatagacaatgtaattttctaaactatttaaatgagatttttctttctttgtagattttttcatatatacatataacatcagaggtctaagcagtatttacctaacaaccaatatttggaaacagtacttcaattaaacatctattttaagccagctggaaaacaatcaattattaccaatgaatttcacaaagatcacaatataattttatgtgatggaaaatgccaatttttcaattatgtttctaatataaaaacctgaagttatcctatgtactatgaatgtcctgcataaagacaggaatatcaagcaaatcaaaattgaaaatatgtgcacagatttaatcacatgcactaattaagacaacataaaaattctgccatactgccaaatggttaaatggattttttattacttttttttttttaccaaatttcataaaattctattttggatactgattatcccatttgaacacctatctaatcattggtttgtaagctaagaatagcataacttcaataaactgattttatcccacagtctaaacagaactatggcatggcaagtactttactaaatgtaaatactcagcgtgctggctgccatacattcaaacagcatctgactctagtgcctgcttaatctcacttctcttggaagaccaagaaaagacagaattaagtacataaatgtcaatgtctatatccccaacttttgcccaaagtcaaagaaaaaaatccagaatgactgccctccctgctctaagctaccaaggaaagaagtcctgagaatgcctaccatttacacatgtcaatatttaaaataatcagaacactgtggaacaaacaggaaatttttctttgtccttttacacttaaaatcattttcaaggtccctaacctaggacctccctttttcattaaatatcttgaaagattctatttcttcaaacaacaataaatacatatatttacatgcactataataattaatgctaacatgatctaactagtttttcaagtatgtctgcaaatttttttaatttagcaaagtgaagaacaaacacatgatcaaaatattgacacacaaagcaatctgaaaagagttacggtgtttacagtgttgttaacatgacaaaaatcttcaatcaaatactattttatattataattcaatagtatttgccagggcatgaaactcaggactggtacacatgaacttccatgctatactgcttacattacataattaactcaagagatgaaagatgttctttagaaaaacaaatcaatgcacggcatgtttttaactaagcacaaacattcctcatgccatatgctttcagaatacttgctgcaattaatgatgctacatgtatactgcaaacttagttgaaaccatcagtaacttactccagagaaaagttgggtatatgctccaaacccgtgtcagcatgtccaacaggttcaacacgactgttatcctcttctgtcccatcctcatcctagaggcagccaacacaaagaaaagtacactctgtgttaggtttcttgctacaatgtgaaaggaaactggataaaatggaagtctaataggcattatgatcttggtaactgtttcctctaagaaggatgacctttaatgacaggatcagtgtgtgttgtaaaaagctaaaattgaaaacaagagtctcatgagatagtgtatcccagaaggtgaataagatatactactgtgataaggaaagaaaacaaaaaaacaaagaaaaaacttatctttatgctaattttcttatctggtcatttttcatttcttttcatgtatattttaggaagtaattacatattactccattgttacaatgtattgataaacaaatatacatgacattggaaatgcatgtctgaaaacagcttcctactcaaaacagttacaacgattataaaccataaccattaccaaaagcttcaaagtcatgtttctcagttcttgattcctgctaacacagcttgtcaaaaggaacaggcagtggtatagttccagattttacaggcttcatcccgtaaaatttcacataaagttaccctaagccaatcgactgattatttagaggtatctgtaaaggtattaaggtcttagccataatggaccacttttgtttacttctgtgcatgaaggaccaaacaaaaggacaagctaaagtaacaaagtactcagcccccatcctcctatgcttcctttgacaaaggcaatattttgtacaaattgctccaatgtgttgcagaaattcaataagtttgctggtgtttacacatgtcagtttagtgaagttatactattctcagcttacaaaccaatgattagataggtgttcaaatgggataatcagtattcaaaaaggtgcatgtggaataaacgtggtagttcacaaaaataaatgaaaagccacccaagaatctaccttcatttataatctcggccactgtcttttcattaaagagttcactattattaatagttaaaagttggcttttcaaaatcatttgaataacgataaagatacctgactgagatcaatggacttattagccagattagaacagttaagagatcctcagattctccaaacacaatgatggaggcatagtctttggcacctactagaagctctgtaaatgttttgctaattaaagtaaaatcatgcctaggaatctctgtggtaatatgttccccaaatgcaactaagtaaaatgtatttaatctgtttcttagaggtttatatgtataatttatgtatacatataatttgttaggttgatcttttctattacataaatttgacaatggtgattttattgtgaacttttttcaacataattcataggtgcacacattgggaatttaccaagccatctatattaggacaggaagtccaacactggagaaaaattttatattttcaatcatgttattccagagactcacagtagaaacgtgtatgccatcaataggaacaacagataagcaagagttataggttcaagatacaatgtcaaacaatatattaaatcattgaagagatagtaagagacggcaaagcaggcagtaaggcccaactgacatttcctttgcgaatctatgagaagtagaaactaagggcaccaaacttttctgtgagtcgtagctgtgctctgtgctttgtggatggtggagctctgcatgaagccaggctatttgattgatgatgctgtgtcttgagaggctctaatatgtacttcttagtcatctatctcctttaagcaccagcacataatacatttcaaaggttaaccaacatcttgaacgtgcctgagaactgcacttggaatgtaaacacgaactcccaaaatcatgcttttccaatgggagtgggtgcaggaaggagagcaaatgtgatttgtttataaaccagatgtaggacacaaaaataatcttacacattacagatctttttttcaggattcattaataatttaaggactactgaaatgccaccaagatgtatcaccacttgaaacacctatgttgcactgtgaaacagccacataaatgaaatgccccaaactacagtgataaaacagtcactgataattcacacattgttcccacagtggccattatcaggcaccaaagagcatggagaatattatttcatgaagctacatacagtgtccagtttggatggcaacattcactgccctgaggctgagctgcagttgctgtggaacctcaacttagattttcccaatatttggatgtgtaaattatcagctcctgtatggttttattctgttgtctggtactttttctttcaagctgtgactgaatgtagttacttttagcaagaactatacactgaattccattataactacagtaaacaaagctgttattatgtatgtcaaatcaatatttaagaactatacagtactggccgggtgaggtggcttacgcctgtaatcccagcattttcagaggctgaggtgggaggaccacttgaacccaggatttcaagaccagtgtgggcaacatggtgagatcccgcctctatttttttcttaaagtaagaaaaaaatagaactatatagtatcaatttaaactaaactgtgccaaagaactttcagatatgagacaatacagccatttgttttttttttctttttcctttccctactctccatttcatagcagagtacagacattaagagcttgggttcaagatttaaacagacctgggcgtgaatagcaattctatcatttgccaattttataaccttatgcaagttatgtacctttccatgtttctatcccttcttctataaaacgtgaacaataaaaacatcttccttggctgggcttagtggctcacacctgtaaccacagcactttagaaggctgaggcagagaatggcttaacaccaggagttcaagaccagcctgggcaacgtagcaagactcagtctctacaaaaaaccaggtgagatagtgcgtgcctgtagtcccaactactgggaaggctgaagcaagaagcttgagcccaggagttcaaggctgcagtaagctatgaccatgcatgccactgcactccagcctgggtgacagagtgagaccccatcacaaacacaaacacacacacacacacacacacacacacacacacacactttaaaaactcttcctcttagtactgaaagaatcagtacgaaaatcctccatatcacaagcattacatggtgcctgacacatagtacttacccaacaaatggttattttataaacattattgaagacagaaatagataacacataatacagaaaacaaacctcgataaatcttttagggcaattatgtacaaatatacgacattttaagagtatatacatgtattcatctattcatacactgtgccttgcaaaacaatttaatatgaaacatattacccactcgatcaaataaaaaacatattatttataatttagaaacttgctgacacctgatatttactgtgctttgctatatacaaaatattttcaatgtagaatgtctttaggatgagtaaagaaaccaaaaaaaagataaataaatgctatatacaatcaagtacatggcaagaagaagaaaactttgtggggtggtggttgaagacattttcagagagaaagtagatgtaaaaaaagtaggaggggtctaggatttttacaatacctgaaagctacaccttcatcaatgctggcagaaggcagaagattcctgggtcacagacaaagaactattcacaactcatagccacaccgctagccagagtatcttccttttatgtagtggttcctcagctaagattctcacaaggtgatgtgaagaggatccagggacactggcacacacagaagaaccctaggcttagggaacctgaatcttttagacagacagggagtatctttgcttgctgctgtcagaggagatcttatacctatcttgctctacaaacatccttgaaaagattgtccacaatgaagacttctgttctgtgtgtgtatatatacatatacaacctcctcctcttagatgagtcatctgtacaaaatgccaagagaacaatgaggagttatctccaaactgcagagtttaatcaaaggattgacaaatgatgtggatgattgctagcagactaaaactaggaatattattaacaaatgatctatgataacaatgccttctgaatagcgatattaaattctactaaaagtcatatcttctacactgaaaaaacaattcagtgtaaaactacatgctcaaaaagatcaagcatgaaagataaaagaaattttgagacttgcaaagagatctttatctccttcacatgaacactttcttatataaagctctttttggaagtgctccagcaaaatccagaaaacacagtaagaaatcagtcagaacccaagggaagtcctagaacacgggagaaatggcagtttaaggaagcagaaaccagttcagataagagcaggaggatggagaggtctagtaagtacatctccatgagaaaaaaagaaactaataattggtctgatatcgttctaaaagttctttcattcccctttagtttttctctttttttgacacggggtcttgctatgttgcccagttctgacctcagactcctaggctcaaacaatactccagcctaggcctcccaaatagctgcaactacaagtttgcacctcctccctgggctcaggtctgatacttttgaatatttgaaaaataaaaggcatcttgacagacctgacacagaatgcaaggggaaaatcaaaaatatatacagagaaaacaaagcaacatgaaaaaaaaaaaattgccccaggagaaaaaaaatctgtagaagaggaaatatattcagagtatccatttggttatgcagtgagcaattgtcacattgccatgtgctgtgacactggctattgactgaaattagactttggatgtaacagcattgaaaggatgggaacaagaaaccagaagcagtataaaaggaacaactcttatcttccatatggcaagtcaacagatgtcagtaactggtaatcaggaaagagcaacataaatatattatttagaaacatggaagtaaatatcagagcagacatttagggagaaagacgggaacagtggcacagagaggctgttcatttttatgataagtcttttagcattatgtctttatttttattctgaaatgcctgccaagggggtggaggggcttctccggtctaactaacatgcagactgtcaaggcccccacagactgcctggcattggattgacagtgcagggtgtaaggcaggagaccccacttgccagcaaggctgtatcatgccttgttttccagaggagtgtgcacccagcagtcctcacagctgtgcaggagccattctcttggggtctctagcagacagcgcaggcgtgttgactcacatcaggaagttgcaagagctaccatggctgaaaagcctcatgccccagagaagccagtgtctcttggaacaatgccatagtcgtaagctgctgctcctcagatatttatagtttttcaagtctcaatacgatttaccaatcagtggttacttttgcctaaaaaggcagtcgacatactacctttattaggattccagaaaaggggggccaaaacataactaaagtttaacttctcatgcagaaattggaaaagagccaggcatggtggcgtgcgcctgtagtctcagctacttgggagactgagacagggggatcacttgagcccagggagttcaaggctgcagtgagttatgttcataccactgcattccagcctgggcaacagagtgagtccttatgcctaaaaaaaaaagaaaaaaaaaatccaaaaacttaagtgatcctaccacaaaaaaagtacaggacttgtaactagaacacttgagactagaatcctgcctccatctctcaccacagaaaacaggaacacaaatgtttacaaaacaagaaatataaaccatactgtctaattcagaggaacactataaaacttaatctagaaaccagtcatctgtatatctacattcaaattctgaggtccaagaagtaaatattttggatatttatcacttgaaagaaaagcctatatttataatttttaaaatgttttataaaaacttaaagttatacttctctacttaaatttccaaaatatctatctttgatttttgtgtttagaaagcacaaaaaaaaaatgaaaattctcatggtacaatttacaatattttctgtcaagtgtttttaaaaaaaattattcataacagtaaataaaatattttaatgagttcaaatatattgctaaaaaaacactcaactaaatgttctttttcatactttttagaatccctccaagattttcctaacttaatgagagacatgttaactattagtgagctatggtatcctagagaaaatatttattaggatgttgacagagtgaattaaagcactttttctttggattacatttgatgaaaaataattccaaagggaatctgtttccaagtctcctaggtatcacaaataggattgcagaaggcattcgtgttaatgtcccaactacttgattaactggccgaaacaccaggaaaaagtaatttcccatcatatatggaaaacaattgaaaacatctgtaggagagaggggcttcacaatacaaaatgataaatctatagcaaccttccaaagaaataaaatcaggaaatgtgtaatacaattttaattcatgatcattatattctgccagaataaaaacattcatgaaaaaaatgcaaatactttttagaaaagacaatattagataagatataataatataataatatatagcaaaaataagatattttaaaattaaaaatattcccttgtagagggaaattaacagctgttacagttttagacaaagtccagttccttataatataaactatgctctactgaacaaagctcaacatcaaattatttaggattctatgaagaattattcagcgcctgtgatgtaatcactgtatataagcgccatcccctcaaccagattcctactattcttatctcaagctagtactgatcaaatgtagtatttaacacagtccatgaaatttccatttcccagagaaatgaaatgcctcccgtcttgatacatatacaacatgactccatacaaccaaaggcaaaagaacagatggtgctgatttatgaaagctatctaaccacagagaacaacaaaaagtatgtatctctgcaccagttccatgcataatggaatcttaaaattcagttccaatatgtaagtcttctcattgattattaggattccagagcatggaggaatcttcttggaagatatttagtccagcatccaaaagtacactgcaatttgtcttcacattcttcttccattttgcctgtcatcaatgattcacacaggaagatttacatattgatgcttactaaaaatcactgaatctaataactagtcccagcaccttacctgccatcatctgccgcattcctatacatatttatcccagatgaccactcaagcagataccaccatgccaggaacactggcaccgcttgttttgcacgaagggcgtctgcactgcttagggttctcccaccacacactagtgaccaagtggccaccctctagttgacacgattttattcagactaatcaatctcttttcagaagtggcttgcttaccagagtaacacttatttttcttttgaaaataaaactcattagctatgtatttgttgcattgtccttaattcccagtatatgatacaaatgtgaaacaaaaattaagatattaaacaaatacaataatttaaagtattaaacatgttatatttgatatggcagctgagcacagtaataaaaaacacggattttgcatgcagaatcattttgacaagttacttaacttctctgtgcctcagtttactcatttataaactgtgggaaataatagtatctatctcagagtttccacaaaaatcaaatgagctaattgaagtactcagaaaactgtcttgtaactattaagggctaactaggtgctcaacaccaccctctagataaattttaaaaagaaaatgggaatttggtaacatatttgttttaaaaaataagtgtccttcatcttctatggcacaaaagttcagttagagtgattaaagaacaccaggctctccaggacactgttgtactgatgtgagatgatttctgtcttttcctcttacctttggtgtttactttcagttttttttttagatcatataggtttttcttttcttacatagtaataataaaatataaatatttaatgtatcattttattgcaatcattaaagaaacaatttttaatgattcaatattctatcgggtaaacatatcatcatttcacaattcactcatcaaagaacacttcaactccagtaactgacagatttctaaataaaaacatttcaatatttaggattcacttctttggaggaagtctataacataatgtttcaaatggcatgatcattttaaggtagccagtatcaaactactttctaaaatgaccgagccaattgatatcattaccagcctcttattaaactgttcatttcacaacttttattttctgtgttgggacacaattctccatttgtctcttgcaaatctgcatgtcttataaacagaggcactgattgcttctgttctggacttgcttttcaaagatacctctacagagataagctgtgggagacagagacagtgtctccctccagggccaaggggagtgagtcttgcttactgccattataaaagattcatcagctcagagtcctgtcctgtaacattacccatagagcatgcaggcatccatctgggcccaagggcatcacttccataggtctagggagtaaggagaactgaaccaaatatgctgatgcttatgttgcatgttgtgctaagagtaatacaatttctcatctctgacctaggagcctcaggtcttctgtcagcaaccatgaaactgaggcaggctaacttgttagcttgcaagtaggataaaatcttagatccttctcagttcttagacagctgctctaacagacagagatgggggaggagggagatagggagacagacaaaaagacacacataccccttattccccttaatctatcagcaaaaagtcttgctgccattctagctggaatttaaaattgcaagtgagattaaagatatcatagtgaaagtgaagtatatatgtcaacttgacggggtcccatgacatccagacatttggcccaacattattctgggtgtgtctgccagggtgtttttgaaagagattaacatttaaatcaggaaattgagaaaagcccagtgtcctccctaatgtgggtgagcatcatccaatcatttggagacctgaatagaacaaaaaggctgaggaagaggagtcctgtctgactgctgagctgagatactggtcttttcttgcctttggactgaagtatcagatcttctgggggactagagctgcaggcatttgggctgatccttacaccattggttctcctgggggtcctgcttggtgactgcagatcttgggacttttcagacttcataatcacatgagccaattccttatagtaaatgttatatgtgtgtatatatctaaagacatacatatctagatagatagatagatagatagatagatagatagatagatagatagacagaatctccattctaccagttctgtttctctgaaaaaccctaatacaatcatatttgtggaatgattacatatactctttgcaagtttatcaggagttttttttctatgtattttaacaaaatctttataagctagtcgtgtgtgtgtgtgtgtgtgtgtgtgtgtgtgtgtgtgtgtgtgtatttcctccttttttaagagacagggtttcattctgtcacctaggctggagtacagtggtataatcacagcttactgcagcctcaaactcctgggctcaagcaatcctcctgcctcagcctcctgagtggctaggactaaaggtgtgcatcatcgcacctggccaattttttaaatatttgtacagactgggtctcagtatgctgcccattttggtctctaactcctggcctcaagcgatcttcccaccttggcctctcaaagtgctaggaatacaggcatgaaccccagccccagccaaactagccattaatcccgtagatatcatatatattttaccaagcaatggcatgttttcattttatgtaaaatgaagatgctgatacaagagaataacattttttaaaaagcgatgtactctcttcattcctctccttccgctttaataaggacccacactttacctcccattccaccttccttttctcccagccctagcagacatccactatctgcattaaggtgtaacctttagaaatatttcttaccagaaatggtcttgagaaaagaactgtttaaaagtggtgacaacacagaatgtccatttcaacagatgtatttattactaaaatatcttgaatccgagaaatgaattaaatgctgggaaatcgtttcattagatttaataaccatatcatttgcttttgattacacagtttggcccaattatgttagtacttttgatttcctcaggttcttcccttgcgatataattaaatccgggattcatgatttgcaaatggactaaaagaacttcagctccttttatatgaaacattttcatatcaatatttaccagaaagagatgccttcagagaaagagacattacaatttttagaaaaatgattaaacaaatgatacataggccaaataagaaatagaaaatacagaagacattactttcatttacaaaaataaaagatttgaaatatttgttgaggtcacactgggggatcagaactgttttactcttgaaacgtttactcttaaaatgttaagataaaacaggatcaagatgactgcttatttgttctccaaataatagactagggtgaagtgggttactactaacagaaattttctctcttgaaaaaacattaggcagtacttcagatatatatacacacacacacacacacacacacacacacacacacatatatataagactttgtaactgataagaaactaaagtcaattttaaaaaataggacggtaggtatatttttaaaaaccataacacctatgcattaatacctgactccagagcatggatgtgtttaattgtgtgtaggaacaatgggcagtacagtcacacaaagacaaagacaaggaaagtgggttcagaagcctttcacacttttcctggaaagtcagctcggtcttttgttattcagattagcatttcaagggccagctctacctttttttttttttttccacttatttgagaaaccttttgactaccagatactatttcctattcaaaaccctgaatctgtcattaggcaatttctaaaataagtctcatagcccttttatccagattcttctttatctctaagggtcccgagttacctgcctcacaggtctctatcaccacgctgagtttcgcaggcttaggtctgtcccttggacattaagtaggaaacccactccttacgtggccaaatcattttggctctgttctctatcattctgaaaatcacccctatatatgaggattttttaaaaaattggaattgcaagggaaagggggaacaagttgatgactataaacgttctttagagtagcaagtcagatattagtaaaattctaccctaaaagaatcattaaaccatgagaaaacttgtgacactagtaataacattgcaaatgtcaaagtagttgagttaaataattgacaaggtcaaagagattaatagttaacgatctcatttcttctgacagtaaaagaaatcccatctagcccgggcaacacagtgagaccttgtctttacaacaaagaaacacacacacaaaaactggctgggagtggtaacacgtgcctatagtctcagcgactcaggaggctgaggtgggaggatcacttgagccccagaggtcaacactgcagtgagctatattcatgccgctgcactccagcttgggtgacagagcgactccagcctgggtgacagagcaagaccctcgctcttaaaaaaaaaaagggaggggggagaaacaaatatcatcaaggtacaaagtacaaatcatatttaaaaaatagaagcatgtctactgtacccacatgcctaagaagagcactgctatggctcagctgttttctcaaggcacttaaaaacccatgacattgctagccataaaacatcctaaaggaacactcagtcggccttgcaacttggataggactgagaagttggaaaggatcagttttaaatcacatcctcgggtcaaaaccctaaggtttctataaaagctgaatctactgaccacagttaacaacaatctggctgggcgtgggctcacacctgtaatcccagcattttgggaggccaagatgggccaatcacttgagcccaggagttcaagaccagcctgggcaacacagcgagacccagtctctataaaaaaaaaaattaaaagaaaaaaataaacaatctattatatatttcaaaatagaaagcagagaggactcgaaacatacccaaggtgatagacatgcccagtactctgatcattatatgttctatggatataacaaaatatcacatgtataagtattatatatttagaaaacaaataaaaaaaattaaaaagcaacgtcactaagtaagtactgggaaaaggaaactgaaaagacctcccaagtgcctctataccataactcttccagggactcatggagagaggaatgggggtgggcagaccagacaagcagatgcagacatgcagattcatctgcagtaaccagaagtttgatcttacaggtgaaagacaaaaatcaatgcaaggaacagactgttaaagccatgatcaggaagaagaaccaccaacttctggaggaataaccaccaatgtgcaagaactggtatgaagaaatcagagagccaggagcgtgctaataaacatctaatagaatctccacaaacaaaaaaaaagggtcaggaggtggggaagccgtatatgtagtgtttgttgatacctgttgcacaaacactcccaccctggcaaccaatatagtgtcactgaacacagagttgggaagacacatgcacagtcggctcaggggaagggagaagtcagccaagtgaatgaagtagtacttgagtaccattagaaagaaaagaaagagttcgcagaagatcaataaataagcaaaatcaataatataaagtatcaacactctgaatgatactcatagttggccagattattgcttttatatgtattgttttacattctagaaagcctattcatatatcacatgtttaaatgttacttgaaccaacaaatgaaatgctatcaatcaatgaatttatagcaaaccagtcaaacagcaaagaacgattcttatctaaaaaggaacctgaattgcataaaagaccagtagaaagggattaaacaccatagtgcctctgctcaccggtatggcacctcagtgggattaaggaaaggagacacttggaggggacacagcttggggtgcagtgtataggtggcattgcacccccaaatctacccatcaacaaagtggtcctgaacatagaattgctatttggtgttttacaagtatacctattaagtgcatacatactgtctggagaaagcagtttatcttatggatattatacttaaatactaaaaacaactttacatggagggtaccctcagagggtaaagatgagtaggaggacagaaggcattaactgagtggtcatagatttaaaagccttcatgaatctgccaggcactatacacacgctgttcctattctaggaatagagaactgctgctcagagtagttaggtaatccatctcctgtctgtgctatcaatccacgaagtctacgtgtatgtaggtctaccctcctcaaaagagagctacttaataataggacacaccgcttgtaaacagagtgcaaaatccacagtgccaaaatcacaagatgtaaatgggaaatagagtttactggggaaggtgtcacaggtagggaaggagcagagagagccccacaataacccaaatcttgtcatgtcacagtcagctatgctttgagcagacataactagactagatgcactcttaaaagacgtccaggagagtggctcatttcagtgacacttcacaccaacataaggagggcaggggggactttgcagagaacatcactaacaacaaacatgagtttcctgctcaaaatgagactatgtcagaagaaggcagcctgcagagatgagaggttctacagtaacagtgagcaaactcagatcttcattaagcacctatcagggccaggcttccctcaggcatctttgcacctacagcatctagctcagtccctgactctagtgtttagttgtccagaatgcgctggattactaagagaacaacctgatgtaaaatgaaaatgaaaacctagccagacactgcccagtattaacactgacatccatttgctagagatagaatatggaaagtgagactatgaacaaatagaggtggctgcaaataaaataatgtatgaattttgtgactttaaatacctttaaaaaagattgtatcacaacatgaactgtaatggccagattgaaatgtctttgcaaaattgtaacaataggaatctgacatacttgacttcatcttgcttctaaactccaagctgtccttcatcattcctggccataggccaagctaactttgggaggaatttagtttacagtttaaccttacagcaaggatgataacaggggaccccttactcataactcaacagatcctgtggtcccacccagaggcatgaggaatggttcccacacccctatgatttcatccccacccaatcagtagcaccaattccccagccctctgcccaccaaattgtacataaaaaccctaagcttcaagcctttggggagactgacttaagttataactccagttcttcagcatgaaccagcattgtgtcaattaaactttctctactgtaatgctgtggtctcggcggactgattttgtctgtgcagcgggaaggaagaatccatcaggcaattacagtattcaggtaagaatgaattcactttgcagttttaaaaagccacagaaaagaacatggattacactgaatttcctatgatcaaaatttttatttgggaaaacttcaaacctcaagaaaattgaaagaatatgctcaacattatatccccttcacctatgaaccaccaacattgtgtctcctctctaatgattttttcttatttttgaatcattatgattaagttgcaatagaaattcttaaaggtgatttgaaggtaatggattaattattttcaaaataaagaaaataatttcgattgtttgggtttattttgaacttgaggaaatttttgaaaggaaataatgagtgcatttatcttaatggttttcaattaccaactgcatttactactgttcagcttttctgacttttcaccacaaaaaggagaaaataggctgagcctaaattccacaggtacttttcaatgtggtacaaagagaaatacccttccttaaccaaattaccaatgtgattttataaaaaatttccactgagtaaaaatgaccaatgacccatccagaaaaaataaagttcctctttcagagtctggagaaagtagcaagacaagtctaaaataaaattttagaaattaaatatacaacatcttttttcagtaaaagcatattcataaaaacttaagttcataaaaataaatctatttcagagctattcattttcaataatttgtcctaactctgaaaaaggagtgtaattctatactctagaagcaagaatagtgaacttcgaaatttaaaaagtaaattttaagtgtctatcatttaacttttcaagacagtaaagtgccatggatgattatattatatattttttatttttagatatttactgtttgaggcgtggtcttgttctatcgcccgactggagtgcagtggcttgatcttagctcaatgcatactcgacctcctgggttcaagtgatcctcccacctcagcctcctaagtagctgagagtgcaggcactcaccaccacacctggctaattcttatatttttctagagatggggtttctccatgttgcccagactagtcttgaactcctagactcaagcaatctgcccacgtaggcctcccaaagtgctgggactacaggtgtgagtcaccgcacccagcatatattctttattttgcacatttaccacatttccaatgggaatgtgaaataactgttactctgcaagccttaatcttttatctcacaaacatgagcaaataaactacaggtctacttcaatattcatgattattaatctttagaaaattacctaaatctgtttcagaaatgtttaactcactagtctttattgagtgactaacttcaaatcactgtagttgacataaaaacatttgtctagtgtgttccattttcagagggcaagtaactccaaccttgtcccctgagagagctttagaatttctgtattttttggagacagggtctttctctgtcactcagactggagtgcagtggcataatcacagctcactgcagcctccacctcttgggctcaagcaatcttcctgcctctgcctcctgaatagctggaactacaggcacatgtcaccataacaggctaatttttgtattttctgcagggaaaaggtctcactatgctgcccagcccaggcaggtctcgaactcctgggctcaagcaatccaactacctaagcctcccaaagtgctgggattacaggcaggaaccactgcacctagcctagaatttttaataaaagacatgtgttcataaaattaaatttaaaaaacagaataactgttgaatattaaaatcttaaaatttgtcatcaagtaaattataaataagagcaaaggttcagtgttgaggggagaatggataagaagtaatgcaaagaaacaggccaggtgcggtggctcatgcctgtaatcccagcactttggtaagctgaggcaggcgatcacctgaggtcaggagttcaagaccagcctgaccaatatggtgaaaccccgcctctactaaaaatacaaaaattaaccaggcatggtggcatgtgcctgtagtcgcagctactttggaggctgagacaggagaattgcttgaacccagcaggcggaggtttcagtgagcagagattgtgccactgcactccagcctaggtgacagagcaagactccgtctcaaaaaaaaagaaaagaaaagaagtaatgtgcaaagaaacattatttaaggcaaggaaaaccaatccatttcagtttggagtgtatgtatgtctatttagaaaatgttttaaatgttaggtagttactaggcagtatttcgccattattaagtagtttcataaaatatttaattagtggtaaagtatataaaatacaatatttcaccctacatttctattccaactctcccttcagaaagaattaaccatcattacaatttggaaaacaattctctattattttatacataggacatatccatacactcaagtgcaatttttcacaagaattaaaacatacaaattacgtaaaacttgttctttttacttaacaacatgacttgcaaatatttcaatacctaggaatttatttttacctcaactgtattgactgattaattgattgattgagacagagtcttgcttagctctgtcagccaggctggagtgcaatggcacaatcttggcatactgcagcgtctgccttctgggctcaagtgattcttccacctcagcctccagagtagctagtactacagatgcatgccaccacactcgtctgatatttttaaaatttttgcagagataaaggctcactatattgcccaggctaaatcaattttttaatagctgcagagtatccccacagtgcaaatataaaatcattgatttagtcactcctccattaatggacacttaagcctgtttctagcaccctgtttttactgctacaattagcatccttattcacgtgcaaatatttctgtagatacgtgaagagggatttctttattcctacttgttttagtaaattattcactctgatcaacaacattcaaacttttaacagtcagtttatacataggagacagatgcccaagataagggtgtatgatcttaaagaggatgaaacagttaaacaaataactcagagatcatgatcctggaattcaatgcgcctcactatgtttgcatccacacaagtgttcctgcttttaagtttactgaatgtgcagctttatgggcaactatttaattgactgatgacaggagtcctctctcttgatggtcactgcctaatcaactttgttacatattttacatgtacatgtacaataattcttgtagaaattaataaaaacacatcacttgcatgcacaaatagaagacaaagactacgatggcaatccgtactgtgtatttataacaaatatgtaagcattaaatcccacagttcggtttcttttctcaaatggtgacattcaaaaatatatgcatgttaacatgttcagaacaaaatttaataatcttcaatctgtaattttaaactgcaaaacaggccaggagtagtgactcatgtctgtaatcccaacactttgggaggccaaggtcggggggattgcttgagcccaggagtttgagaccagcccaggcaacattgcaaggcctcatctctacaaataaaaaaaatcagccaagcatggtggtgtgcacccatggttccagctactcaagaggctgaggtggaactgcttgagcctgggtggtcaaggctgcagtgagccatgatcattccactgcactccagccttggcaacaaagcaagatcacatctcaaaacaaaacaaaaatgaaatgcaaagtataatttatctttccaaaatgatcccaaggaaaactgcaaactgaactagcatttactagttattaacatatataagttattgtactacttattaataattattataactagttatttaagtaataaattataatatttaaagtaaatataaaatataaaagtatttaattataatttgtaattagttatattagttattaataattatactagttattacattaatctacattagattatacatttctatgcatcatatacaactaaaaatgagcatccatgtttttttttcattcaacttaaaagcacaggaatcactaccgcttgaagtaaactttgggtccggtctgttaaagtgaaaatctgctaaaagccatgaactcttttcctagctgcaagctcattaaacaataaatcttatttgtgaattcagagagaattcccaccctgaatcattcacttatttattcaattattgaatgcctatgatatgctaagtgccatcccaggtgcttaaaacagatgagtgaacaaaacggaaaagatttctgcccttctgaaactcatattttaataggcagggaaagaaaatacacaataaatgtaaagaattgtatgtatgctagtgctattaaaaatgagtaaggtaaggagacctgggaatacagaaatttggagaggtggggacgttgcagaggcagcaagataaagttgtaaacagaggtcagagaaggtctcagtgaggaggtgaaattcaagtgaagacttgaaggacccaggagaattaagcaagaagatatctgggtaaagcaatttccaggcagaggaccagaccaagggccctaaggaaggaacagatttcacagacttcccacagcacatccagggacacccactctcacccctaggaatctcagtttatgaataatccacctttgtctatgcagttataatttagtagataatatcatggattttaaagttagaaaggctgagatttaaagccaaggtatatttactgtgtgacctttagcaaataatatggcattcataactcaggttcctcaaccagaaaactgacgtaataatgctaacgtctaccccataggatctgtttaagaataacgtatataaaaaacttagcagggtaaaattcaagacatgctagttcttgtcagatatgaacccaaagcacaggtaacaaaagcaaaaataggcaaacaagattgcatcaaactaaactaaaaagcttccgcatagccaaggaaacaatcaacagagtaaaaacacaatgtatggaatagaagaaatatttggaaattatatatctggtaagagattaatatccaaaataaatacaaaaaaaaaactcaagcaacttaacaaaaagaaaacaaataactcgatttaaaaatgggcaaataatctgaatagacatttctcaaaagaagacatacaagtagccaacaggtatatgaaaaatgcttaagattactaatcatcagggaattgcaaattaaaaccagaatgacatatcaccttccacctgttacaatggctactatcaaaaaaatgaacgataacgtactaaagaggatgtggacaaagggaacccttgcattctgttggtgtgaatataaattagtacggctattatgaaaaagggtataggggttcttcaaaaagttaaaaatagtgctattatatgacctagcaatcccaccactgggcatgtatccaaagaaaatgcaatcagtatgttgaagagatagctgtactcacatgtttattacagcactatttacattagcgaagacatggaatcaacctatcttgttgtttatcaacagtgtttatcaatagaccctgaataagaaaaatgtgtaatacacagatacatacatacacaaacacacacacacaacaaaatactactctgcctttaaaaagaaagaaatctatcactgtggcaacatgaatgatagtggaggacattatgttaagtgaaataggccagggacagaaagacaaatactgtatgatctcacttattgtggaatctaaaaacactgaactcatcaaagtagagagtggaattgtggttacctggggttagggggatggtgggtggggatgtgttggtaaaagtatacaaaatttccattaggaggaaaaagttcaagagatctactgtacaacatagtcactgtagttaataacaatatactgtatacttgaaaactgctaagaaaacatgttttaagtgttctcaccacacaaaataaacgaagtacgtgaggtattacatgtcttaattagctcaatttagccattccataatgtatatatttcaaatcaagtcgtgcacaatatatacatttttgtcaattaaaacattttataaaatttgaaaaggaataattcttgtaattactgttattaaccaaaaattaccctaaatacagcacactgattcacatatacacaaatacatacacaactgaatttgggcatgtttaaaaaaagctagtaatgttattactattatcaaaattgtttttaagagaaccagagtttcaagtagttacgtcaaattatgcaacaactacctaggttttccagaccaccttaaaatcataatggtgtttttcaactcacagaaccgttattaaagttcaaatattaacaaactggcaaacttataatcacatggggaattgaaaagaaatcatgaaactctggtccaatttttatctacttattcataggaagtccccaagcaatattattccagcaaaaagcaactcaccacagattgaagattaacccttaaattcccttttatttttaaggtcataaatatttctatatttgcaagtgttgttattgtatattaacatcttacctaatataatataatacaaacataatagaaaagtcaaagagcagctaaaaattgatgaacacttccattcttttcttacatacagcaatgcatgcaggggatgaaaaataaaatcaccagtcatcattttctctaacaaacaaacataaagagtttcttaggatgaacagagattttagtagcagaatcccctgggataagaatcaagaccaatgttatttaatacattcataataatctgttggaagaaataggcaacaagatgtattcgagtaacagaaaaccgtttaggtaagtagaaaccagaaagtctttgaaagactccagaaggaactaatcaaatatgcagcatgatgaaactgggcttagtaattcaagtaatcaagattctaactttacattttttatttatttatttatttattttgagacagagtcttgctctgtcacccaggctggagtgcaatggcatggtctcagctcactgcaacctctgtctcccgggttcaagagattctcatttctcagcctcagcagaggctgggactacaggcgcgcaccaccacgccggactaatttttgtatttttagtagagacggggtttcgtcatgttgcccaggctggtctcaaactcctgacctcaggtgatccacccacctcagcctcctaaagtgctgggattacaggggtgagccaccatgcctggcctaactttaaattttgagcaaaaagacctattacatgagcaatggctctctcctatcagcaggcaactgggcaaaaatctcctttactatttaaaaaattaaaacaaagaagattcctctatttctcttagcattccacattttatacctcccattttcttcacagcctcctagaaacctggggcgtgtccctccattctactgacattgctgtgagccatttttaatgtctcaatcatatgaaaattacatcttaatcatgaccaagaccacttttttttttattccacctcctatcttccaatttttttccatctctactggaatagcctgcatttagaatatttttgctcaccctcctaagcgttctctcttttgtctctctcttctcaaatccattttcattatactttaatgaatgaaacattcatttggaagcaatgtgacactctagaccccttctttcaccaacattgcctcttaacgttatacatttggatactttcacaaccagaacccaatctaagttctatgcaccccggccactaacaaacaactctcaacacatcagattactcacaaacgaaaattccaccaatttgcttttcttttcttttttggagatagggtctcgctctgtggcacaatcatagctcactgcagcctcgaactcctgggctcaagggatcctctcacttcagccttcctagcagctgggactacaggtgtgcaccactatgtctggctaacttttttactctttgtagagatgggggtctccctaggttgctgaggcttgtcttgaactcctgggctcaaatgatcctgctgccttggcctcccaaagtgctgggattacaggcgcatgtccctgtgaaaataggtggcgctgggcatggggacatgctactgtaatccattttcacctaaactctgactttttgccaaggattttaatccccttctagtttaactcttacttgtgcttcaaagcctaaagtcaatactatttattcacccaaagcagctttagtgttttgggcagagtacccaaatttctattcaactgtcaaagtcactgaaacgttcacagatgctttacatccacctatattacttcatcataaacacaacaatgattccaatcttctgtggacccaataaactatcaggtatctgaggacagagttgaattttttttaatcaatactgaacaccaaagcctagagtcaatactaaagaaatatttaactgagcaaaaacaaaatggcaaatatagtattatattttcaaccgtacaagtaataggtttaaaaaccagaatcaactggtttttaaattgtatctctatcacttactaggtaggtaacatgcaaacagtttagtaaaaggatgagttttcttacctttaaatggcaatagtaatgcctgctttacctacaagatcatgaacactgatatttagcacaaaccttggtacatggtgaacattcagcaaactgagtttcctcgttactcatagcattttcaatataaatgttaaacaactgaaaacacagtaaacagaatccatccactttttgcatgtgcttggtggcttacttcacgctaaaatgtccttttggagaatggtatttttttgtagaaaagagataaggaaaagagaaccaaaatagttacagtgctatagaatccacttctataattaaaaagtaagataggcaacttaagaatgagtaattacatgattatttcaaaaaatttacttgttaaaatatttctaaataatagtaccatatcggcttaagtttaagactaatatctagtggcaaatatttgttcaaatgaatgtcctttttcttcacaagtacctcagtgttaaaaatgtaggagaccttcaataagttacagttaaaagatgagtcacaaccagaaaaggaagtagaagaagagcaatcccagaatcccaggcgtgtggatgttacgggaagtcagggaccccaaacggagggaccagctgaagccatggcagaagaacataaattgtgaagatttcatggacatttattagttccccaaattaatacttttataatttcttacacctgtctttactgcaatctccgaacataaattgtgaagatttcatggacatttatcacttccccaatcaatactcttgtgatttcctatgcctgactttactttaatctcttaatcctgtcatctttgtaagctgaggatgtatgtcgcctcaggaccctgtgatgattgcgttaactgcacaaattgattgtagagcatgtgtgtttgaacaatatgaaatctgggcaccttaagaacaggataacagcgattttcagggaacaagggagataacctgaaagtctggctgcctgtgggccgggcatatttctcttattaccgaaaacgggtaagagaaatattgcggaattctttccccagtaaggaatattaataattaacagctctgagaaaagaatgcattcccaggcggggcctctcaaatggccaccctgggagtgtctgccttatgcagacgtaggtagggatgaaacactccctagtctcctgcagtgcccctaggcttgctaggattaggaaattccagcctggcgaattctagtcagaccggttctctgctcttgaaccctgttaagatgtttatcaatgacaatgcatgcacagcgggacatggaagttcattagtgattctagtttcgccctgaccttgtgacctcgccctgacctcctgccttgcgatcttttgttgcccttaaagcatgtgatctctgtgacccacaccctattcctacactccctcccctttgaaaattgctaataaaaacttgctggctttaccgctcagggggcatcacggaacctgccgacatgtgatgtctcccccagctttaaaatttctctcttttgtactctttctctttatttctcagactggctgacacttagggaaaatataaaagaaactacgttgaattatcggggacaggttcccccgatatgtggaggcgatgaaggggtagggggaagtggcaactacatagcacagacacaaagacacaaacacaccatatcaccatgtagaggaatgggggagctggacagtgaagtggaatatgtgatggcaatgggcaaatgctacctgagagagaaggccggtagaccaaggctcttgcaaggtgagcaactcccaaaaaacgacatcatcccacaacaaacctccagcacttcccccatcttcaaaataggacaactaactgaggaagaatctctcccgatcaacaaacctccagcatttccccaatcttcaagatagaacaactaactgaggaagaatctctcccaattcccctgactctagtgataataaaaattttaaagcagtatgacttataggattcttatgaataagcctagtcgtaagagacaatgcaaagagcccaacataactaaaagctcttcatctactcacaaatacctaccaaaaattgctttattgctaaaaatgtcttaagccaggtgtggtggtgtgtgcctgcagttccagctagttgggaggctgaggcagcaagatcatttgagcccagaaactcaaacccagtctgggcctcatagtgagatcccatctctaaaagaaaaaagaggcctaaaattatataaattgtctttatttcaaacatttaaatttagaaaactcatttatattagtgcacaaattaattcttcaaaatacagttgaaaatgatgtagcccccttcactgttcagaaagaagacgacaacagctgtgttttctctggagtaaagaggttagagccctgccaatgggacaaaagggccaggaaggattataaagccagtggttttgctaaatcaaatcactggtggggtgagagactgtaagaactatttttttcctacattataaactaaaggaaatcatgcagaaacactaacgctaaattttatgtaagcttgcacaaacacacaaatatatacacacatccaaaatagaagtacgaatcagtcaaggaaaatttgttagcaatgcaaaatggtgcaccaaagaaagaaagaactcttgctcagactggaggtagtaaagaaaagaataaacaataaacaattatttttaaaaccacagtatgcatatggaaattttttagaagtcatagtcagagtagaacgcttataaattcaggttgtaaatgaattcacattgaaaacatcatacaaattaattccttttatattttaaagccaaaagtaggtacagtgcagaacttgaaaaagacttagtttctatgagaagaaaaagaaaataaaatctcagaaactcggaaaatgaatttttatatcccatgtatgctggataaaatattcatgaaatgaaatgatatttcattgtatatatatattatatagtcatgaatgaaggttttagtgacaaagttacttctgtctagacacctctttgaatttaagcaaaacttaacctagatgagaagcattagaaccacaagtaaataaaaatcttttttttttttttcctttttttgagacagggtctcactgtgtcacccaggctggagtacaagtggcatgataataggttactacagcctccacttcctgggctcaagggataatcctgcctcagccttctgggtagctaagaatacagccccactctaactcagttttgttttgttttgttttgttttgttttgttttgttttgttttgttttaaaacggagtcttgcactgttgcccgcgctggagtgcaatgatgtgatctcagttcaccacaacctccgcctcccgggttcaagcaattctcctgcctcagcctccctagtagctgggattacagatgcccatcaacatgcccagctaattttttgtatttttagtagagacacggtttcactatattggccaggttgatctcaaactcctgaccttgtgatccgcccgcctcggcctcccaaagtgctgggattacaggcgtgagccactgcacccagcctaacccagttatttttaattttttttgtagagatggattctcattatgctgcccaggctgatctcgaactcctaggcccaagcaatcctcctgatttggtctcccaaagtgctaagattataggaatgagtcactgcacctggctataaaaatctgttttatttacaaaaagcagcttagccataatgctagtacttcttagtaagatattaagaaacaccttattgaaagtgtttaccatttgagtacaatctgagaatatgccaactggcatgttcttgaattattggctatatggtattttttcttttgttatcaaaggattttaaccatatgtatgactacatgaaaaacataaccatctaacacatatgagaaatataaagataatactgatcatacactccaaattttttctacattttaaaaatcctaacctagaatatcttagaatagaatagactattgtacgtaatttacttatattattctaacaaggctttccattttaagcagcaagttgacttcctaatgatagaatatgactatcaaaaatttgtagcaatcactaggattggataagcagcgagaagaaaaataaattttatattaggcttgcatgaactagcatacggtaactaaaataactaacactgattaatattgaaccatattattttacattatctttactgaagtccatgaaatcggttctatcatctaccattttgcaaataagaaaactaaaataggaaacaatcaatattgccaaagtcacacaactaaaagaaacagaaattttagctttttctgggtcaagaccataagctgtccgctatggtattaaagcttctgaacaactgcataaggaagaaagaggcaatttccccaattatccagatgaggaaatggaggatcacaggggtcaggctaatgaatgcctcagaaagtcaaatctaggccatctgattgtgggcatattacaccacttcctcacagggtgtgacacagagggagcaccgcaacatcttttactccacagaaatgaagaggaacatgtaggtcatgtgataaaaactgattggcgttttctagacagatcattaactgaaataaatgatttggatttccacaaaattctaccacacactttcttttttggatatcagttttcattaagtgaccattttagcccaggttgaggcctctcaaggaaactacagattaagtagcttactccagattgcagttaataagtatgatgctgagatccatcttggctctgcacatgaataacacccctgatgctaccccttcattttcaagcagagtgtcatcttaatgtgagcatcaatacacatgatcaaagacagaattaaacaatgaatgacacaatgctgattcagaaagtagggggagtctagcattgtaggaatatctgaagtcagaaggaacagaattgattttaaaggaaggcacagcagtccaccagagcacaaaatatgcatgagatcatggtaggagatgatgcctaaaaaagttaaatagaaatttgtgccgggtgtggtagctcaggctgggtgcaaggggctcacgcctgtaatcccagcactttgggaggccaaggcgggtgatcacctgatgtcaggagttcaagaccagtctggccaacatggtgaaaccctgtctcttctaaaaatacaaaattagctaggcatggtggtgtgtgcctgtaatcccagctacttgggaggctgaggcaacagaattgcttgaacctgggaggcagaagttgcagtgagccaagatcacaccactgcactccagcttgggtgacaggagcaaaactctgtctcaaaaaaaaaaaaaaaaaaaaaaaaaaatgccgggtatggtggctcatgcctgtaatcccagcagtttgggaggccgaggcgggtggatcattaggtcagaagatcgagaccatcctggctaacacggtgaaaccccgtatctactaaaaaaattagctgggcgtggtggcgggcacctgtagtcccagctactcgggaggctgaggcaggagaatggcgtgaacctgagaggcagagcttgcagtgagccgagatcacgccactgcactctagcctgggctacagagtgagactctgtctcaaaaaaaaaaaaaaaaaaaaaaaaaaaaaagaatgcagagaacccagaatatcaagataataaatttgatttaacttaaatcaaaatacagtagggagtgttttgcatgcttttaaacttgcaggtgaggaaatccaagtggcaatttggaagactaagcaaataggaaaacgcagaattgattttaaaaacaaacagatggagagggagacaaatattacataggtctagtcaaaaggaatatggctgaaatgagaacaggtgctgtgaaaatagaaagatatacacgtgcacatacacacacacacacacacacacacacacacacacacacagaggagtaaaggtataatatatagtacctggcactaggtaagacataaaaaattagagagaagataataagagagtaagtttgaagcctgggagacacagagcaaaattaaaagaaacaagaaaagaatggccaatcatagaattttctgggcgtaggaaacaccagaaattaactactcatgatttcacaggggtaaggtaattctgaacacataggttgctatatatggcccagatccatggacaatgaggttcagaactggcagtttcaagtcacattgccctttttattagggaccacttcccatctcagggaaaacataaagatggtttaccttcacccatgttgaatctgagtgatcaaaaagatatctagacagtagtgaccagcccatccttgcaggtaagcacaagtctgaaggaacaggaagaggaactaaagtaacataaaagttcaccaaggaagagcatgtaaaaacccatccagagaaatgaccagcactcagggaggtagagcaaaaagaagaaatttctataaataatatgaatgagcttagaaacagaatgtcagaggagtgaagaggaaagcttctccagggtgccacagatccaaagtgctatttcagccatttactaacagcagggggaaaactgcacatgtaccttaaagtacatttaaagtaccttaaataaaatgtttactttcaataaaaaatttctctgcatattttaccatttcaaatatatttaaggaactaagacacaggattctaccttttattaaaatctacaaccaaaggagtaacagttaactgttctgtaataatgtgtaatctaacataacttactcccaagtcaaaagcaaaaacttaaaaattcaaatagtcattatattgagccacagaaaatacaccaagtcactgcctaagtcatgtccaatattagacaactaaattaccaaaaagtttcacagattgctcaatggaaaaaccttttaaaaataacaaatacattattttatttgaatcaagacctatttttcttggccaacctacaaaaatatgtttctctttctaagagttcaggacattaataccaaagtctcagccagaagtttatgaaagtattactgaactggatctgtttatgattataatacaaagttctcaggaaaattagtcccccaagggacttaaaatatgagtaattcaaaaagcccagatttctgctgatataatcaaactaacattccttgccctcccctcaaactttctccaatttaatctagaggagattcttgaaaagttaatcattcaatgtaagaaaatatatactatctatggaataagatttttttatcaaaatggttgctgtaaaaatgttttaagagaagaacatttccagatatacaaattacaagcagaaagccctttataataacaaatgtattcaataaaagcatggttacgctaggctgcaaacgtatgtgacagagacccaatgcctccacacattgagtcatgcctccctcgaaaacaaagcaaattaaaaactcagaggaacagatatgggtcctgccctctttaaaaagaaagacataattaaaatgaaatttggaaagtgcaaggatgggaaagaataagacactattatgtgtgcctcacattggttttggcagggatcgggtatggctaagaataatgagctgaaggaggcaggtggcaggagatcagaacagcagatcctaggcaggaaaaagggaagagttggccagcatgttcaaagacccagagatgcaagaacagggtagatctggagactagagtgagttcagcagggctgcctaacctgggaatgcaccctggaagcagctgcgatccacatggtgaaggaacatcaggaagactcaaaaaggacaaaaacaccaatatcagccctcacacttagagtatttcatgtgttttagctactgtcttaagagctttccatgactcatcttatctcatcctcacaatcctctgaaatatatcacaatagattatgaagcttgctctgacacttagaaagttcagcagcttggtcagcataagacatgctgtgcaattccaatccaggttgctgcaacttcaagcagctgttaaccacttcacccacggtgttcctgggtatggtcagagccccagagtgtgtcaagcagtgctcctgaccacacatcagtctagccacagtggacaaagagatgtaaacagggaggagggctgcagtgttgtgtagtgacccaggtgagagctgttgacagcttggactttggaagtagtaatgaagatgcagagggatgaatgaatttaaaaatacaattgccaagattagaggcatacagaaaagaggaggaaaaagtaaagaacactctaaatatcaatggctgataaaaggtgcaatatcaggatcctggactgtcttttccttagtgaaaatagcctcaaaataacatcataactatcacattcacacaccagcacatattcacattcacacgaggctttgctatgagctgcacaaattctgtatttattttgatcaagcataaaattaatttaattaattaggacaagttgacatataagagatagaaaaccaaaataaataaaggtatcagggaacggtaaaagacatttaaacattctgtcattctaaacacttacatgcaatttcagaaattccacatttgatatctaatattaatttaatacttatttatcctgtgtatatgtgtgcatagctgtttctggtttacattttgatattacaaataacaggaaaaaaaaaggaagtcactgtggctatctctggtacttttgttgtaattgcagatggcaacacttcatcatctcaacttcttaaacatcagaaagggaaaagtttggaaacatcaagaacaatctaaaatcagttgcttcctagagtcaacgaatcaatatatccaaagacacagaattcttaccagccaggacttccaaatactcatttaagccaataaatgatggaacaatgaaagaaagagaaagactgccagatccaaataggtagtaagataatgagaatacaaattgccaacaacctttcatggtatgagaaaggttacaaatgagacactaatatctgttgactaagcccccaaatagaccaatcccatcaacagaaatcttgtatcttaagaaggtgtgctttcttcagtgaacccgagcaatcgagaaaaacatagtatgtttacgtttggcaagaagaccacattcattcacaaaagtttaaatatttcacataggtggcttctatactatcatataacatacagtctaagacataacaggaaaaaagttaacacagaagtaaattacaaagcaccccgctttgggatatactaagggaagaaaacactattgattctgttcagacagaatttatgggcaaaagttactgttgagaacacagcataaaactcttacttttcaagaagcacttagtgaactacccatcttaaaaaaagaaaatcttgtcctttttctgtccccgtcattctactcattttcattctggcaaagtatgcaaaaacaacaactatcaaataggagataggaatgctcaggggtaataactcaattccagttgaaaatataaaaatatgaatcaaatacgaaatttagaatatgaaaagaatacacaagttatgccaaaggtaagaactttcagaaagtctcatttgatttatgtgcatttcagagtgactgacatctgagcaaatgctaaagaattgaactcaatgctctaacagagcaagaagaacccaactctcaccccaagacgtccttttccttaactgttgtttatttgttggaggaaaggggaaggttttgaatggtctgtgctcctaaacagtataggaagcccacttgcagcctgtatgttggccaactccatcaacagccttctgctttagagaatgtgtaaagggagatattttaaaggtataactgatcaagtcagtttaatagactgcatacaacatcatgtcacaatgtgaggtgatagagtgaacagggtctcttgggcattgctagtggagtgcaacatggtacgatgtctactgaggtcaggttgacaacatctatcaaagttacaaatgtatgtaatattcctgtacaatgtgtaaacatacaatttcatttttaggcatacttctgtgagaaactcaatacaaaatgacttatctataacaggttatttactgcagtatatttatgcaacagcaaaggatagtaaataaccttaatgcccatcaataaacactggcccagctatacaaaggaaaattatcaaagtgtttcaaaaatggacaccttttatgtgtcagtctataaggattgccaagctatattaagaaaaaaaaaatcaaagcacaggatactgtagtagtatttatataaaaaggtgaaaagagaatatgtttccgtatttgctcataaaagcatggtaccatttgaaaggagccacaagaaacaaataactgtggctgaatacggggaggagagctagctaatagagagttgggggagggagactactattttgcatctccatgtataacgtttgattttagaactatgaatgtatcacctttgcaaaattcaaataaatattttaaaaattaaagaatgttatcaaattaatccccctatagtctgaagagttatactgtatcccatgggaacagggaagattagaatcctgtgtctcatacagaagtctaatgaaccctaatgataataaggaattgggacacctatcatcatcaactcaaaaaaacaaaaaatcctctatagcctgtatggggtatcctcaaaccaggatacactccagtgactaagaaactttttatgcaataccataatgaagaatatttcctctgtatttgaaaatgatttccaaaactcaaaataattctcatatcaaatgtcaatttctaccaaatatccatgtacaaaaaaagctttactcagagaactgaggaaaatactccccaaaagctatatactaggtattacatattaatggtagatcagaatttgtaacatccatgttttatatattgaacatgtaagcaaacatccattgttcctagaataagaaaaaaattcatctccaagaaaaaaaatttgccagtttggggtcttaaattaacagtataatttattttcatttgaataaaaatgaaaaacccctggactctctaaagaaaaaaattttaaacagctaaaatcagctcgcaaacaagtaaaatacgtaatattttatggagggaatatttaactatgttatgttcaaatcaattgcttataaattattcaatataatcaaatggtttgttcaaatattgtttttccaatttaacagaaaacttatgtcactttagttatataaacatgaagagttatttaatatttcctgataattaaacatcttaaatatttaattaaatacttttagagctaatagagttgacaactatcttgggcctataagaacacttttttggcttttccttttgtcccacaaaaatctcacataagtagctcatagcagctcttaccctctgccccctcactccctctacaaagcctctggagagccaggtggctttcccacggctagtgtgatcagcggtgatacagcagacaccactggatacaggccagcggggacagactgagcgggcttatcttctaacactgaatccatgttcaactacaagacattcttgaagaaagttcacaaacgattaaacttatgcacaagaaaggctgtgctctccatcatatcaagatttaaaaaaataggaacattgcattactttgagagaacttacatttccctccatttcttggtcctttagtttataatcatttttttctttttgtcatatgcagatgctaagttataagcaataatgtcatcaaaatagtacaactatttatgaggtttacaaatgtacatgtcttcatcaagttttcatttatttacctataatctacagtttatagcccataattaatgaaaatcaccatatcacattatatggcattataaaagagtcaatatagttcacccaacaaagatccacccataatacatgatatcagaaaaagtagggacattatgaactttttcctttcaatttattgaaagactatttacccaaaagtatataagggttcactaggagctatagtaaacaagacaatgcctgggccattttaggacagcaaaacagacagaaagataaaaaataaaaaagaaacaaaagacaaatttagattcataaatatcacagagaaaaggatggtgagcaaagagacaataacagaaggctgcagggatatcacccgccatcaaatggggggatggaggaaagtccctgaggggaagacaggtgactgcatgaaagctaagtgggaaccaagtgtgtgaactgtgagggagtgcaagccaggctggtgccacaatgagacaggggtttgccagggaggactggggttggttgagtctatctgctgataggaaagttctagaagagagagagaaaaacaagagacattcacgactgtgaagacaggagattatgtgcatgactccgtagacaggagattaatacaaaagcaacgtcctaatactgggaagggttgggagacaggatgagagtgaaaactttggtgtttgagaggtcagggaagcttctgcatgcgaggaagggcagggctgtaaaaatggtggtgggaaccaggctttcattttttcaatggaataaaaagctaggtcagaagagttaatgaattacttcggagaattaaagggcttactaaaggtaggaaaagaggtggtgcttctcaaagggttaaacttaattccaacacatatcaagactgcaattccatcttacaatttggaaatgacagtaacttgcagaaaaaaaaaaaagctcagtcttccaaccttgtgaagttatgtattaaaaataaaaacattttttaatttttttttcttttcttgagagagtttcactctgttgcccaggctggagtgcagtggtgcaatcttggcttactgcaacctctgcctcccacgttcaaatgattatcctgcctcagccatctgagtagttgggattactgcgtgtgccaccacacccagctaatttttttatttttagtagagacagggtttcatcatgttggcaaggctggtctcaaacgcctgacctcaagtaatccacctgcctcagcctcccaaagtgctgagattactaaaaataataacatgtcaaaagtattacgtgcctactataaaggacagtaataatactgacacatgaaatgagacccaaaagcctacgccaaccctaccgcaataccgtactttaatttctttataatttgttcagctatttaaaaagataatccacaatctcctaccgccattagagcacaggaaaaaaaaattcaaaaataaaggaaaaacatggctcatatatctacagaagtcacaaaaatactatagggcacatatacccaggcctcagcggtgggaagaaaacatacaaccaccgggcaaaatgtttgaacactgaagacgggaattttttagggccatttcaagaccatgttgaaggtaactgggaaagtcctggatagaaatagattaaatagctagatcataaaatttcaaaattaaaaatgacttataaaagtgattcaatttctaaaagcaggcttgtaggacacaggcagtgaaaaaaacacattgtaggatgaaaatgttaatgcaatttcataaccagtattttttaaagaatagcagttgcacagctcatggaacatagatggaacgtagaaataaagaacaaaatttcaaaagcaaatgacgtacagatgggtgggaataaagagagttatagtataaagcatgtattccttccattgtcgtatttaatcacacagctcacaacaaaaatctttaagactgcctgcaatgaaaatatgcaaaggcacctgaaggtcaaagttaaaaatgaaaatgtatctttctccgtagtgcaagctctaaatgtctagttctagcagtagtattcacaggtaagaaaaccatcagctcctaacagacttcccctgaaggttaatccacacaccaccaaagatttttcactcagtaaaatttctaacttacttccccgctgcttgcaggcttttagctccataggccaaagaagcaataaataaagacagttgtaaaatttgttttaaaggagaaattgatgagtacccccattcaactgcacaccccaggtccaaaagcaaatgagtgatgctgtgccctccaaactccattcatatcacgaagggacccagatgcctagcaagtggtcaagcagaagctctcatgaagatacttagcattcttaatggtatccttacatttaatcttattaaaactacacacgcccgccaaaaacaaaagagaatataaggaatggaagcagacatagagattaacactgatgtcatttttgtgtcagattatgttcttcagaaaagaaccagagatgattttaaaaggttaaattttattctaattctgagaagatgccacggaagcaaaaatcaaattgcgaaatgacgatgggggcattagaaatacaccagggatgaaaataaaccaccccagcatacctaatggtacttccaatatgcaaggagaaaaacaaaatttaagaaaacgagatacccaatacttgagggagttgttgaggtataaccaataaacctaatgttacctaaaaagatatgaaagaaaacatcttatgagtgtctttaatatacaagaaactgggtctgcactggaatgtgtgctgtgtcacttcagctttgcccacaaagttaacatctgccaaatgggtatgattttccccattttgtatacaatgaaaatgaagtttgcatagtttatctttctttatttctatataaccagtcttaggggtcagaaacaggacacactcattggagggacaggtttccaaccctgaaacatgcttcccagattcactatgtcttttgttgttaaatatatggaaaagtagaatgccatctggtactcctaaaagtaaccctgcacatgactggaagctccccagaaaatgtgtgtgtccttctaagaagaacgtccaccagagccccacactccggtcctgtgcttccactgtggtttctagtccagaattcttggataataaaagcagaaaatatgtagggatcatggaaaataatgtgtcccatacatatagggtgttttgatcattgtttttttaaaaaataattttaacacgtgttagaataccagggattctattatcaaagcacaacaaaataatctgctactggcgttaatatatccaggtaacaagtctcttaaaaggttgttttggttttattttgggtgttattggggacataacagatttatcttataaaatagaagttctggtattttataatgaaaagtaagtttaattttaaaacaatcttgatgtttttagtttctacatttggtgttgctagagataaacacgactattttgcttctctacaaattttatgaaggtttgccaactggtaaataataataaatcccttcctttccacagaacttttagaatttggaggcaaagggcttagtttatttttaaccaaataatatgaacagtcatttggatcctcattgacttcacgctacagaattaacaaacccaaaaaacccacatcttaactactatctggcagcatcagaatctatccttaagtctcaccaatgatggcagataccatgaagccctatctattcctatatcagactttctatagctcttccacggtttaatgctgtgacccctcagtcatttccctgaccgatctgaagttgttgtaatcagattgctgaataaaccacctcctattgtaattaagaaaatataggcactgaggggagccccggtggctcaggccggttgtcctggcgcacaaggaggcgaggctacgcattcgaggccaacctgggcaacatttaaaaggcctcacattcgttaaaaaaaaagaaagaaagaaaatacaggcatcatggctcacacctgtaatcccagtacttcgggaggctaaagcaggagaatcacttgaagccaggagtttgagaccagtctgggaaacatagcgggaccccacctgtacaaaaaaatttttttaattagccaggagtgatggtgtgcatcagtagtcccagctgctcagaaggctaaagcaggacgattgcttgagcacagaagtttgaagctgaagtgagctatgactgcaccactgcaccccagtctgggcaacagagcaagaacccagcctcttaaagattaaaacagaaaaaagataagaaaacattatcatttcatactccagaaaacatcttctttatgtcatctggatagttctagatctcagggaaatgagatttttttttttcacttagaaaaggctagtaagcacttgggcaaggaaggggattttcttctatgtaggcagatcagtggaaaaaaaacaactctggtaagtcgtgtggacacaggaaccacaggttgatcatcccagacacccaccattttataagaacaagctaaaacctaggcaaaacttgcgtccacaattatattgactagcctggagaaaaacacatttttaaaaaactgcctccataaaacctggatatgctgaaaaatgtttcttcactagtttttaaatttacttttgccctcaatcttcaagaatttggctgtaaattataatgaaaacaaaaaattaaactcatagaaacttaccttctcaaataatttttgaatataacttatatattgtgtattgtattagtccgttctcatgctgctgataaatacatacccgagactgggcaatttacaaaaggaagaggtttaatggacatgttacagttccatgcggctagggaggcctcacaatcattgtggaaggcagggaggagaaagtcacatcttacatggatggcggcaggcaaagaaagagctcgagcagggaaattcccatttttaaaatcatcagagttcatgagacttactatcatgagaacagcatgggaaagacctgcctgcccccatgattcaattacctcccaccaggaccctcccacaatacgtggaaattgtgggagttacaattcaagatgagatttgggtggggacacagccaaaccacaacatgtatcatgtgaatattgtttataatgcataaatattctgaaaagtataaagaaaaagcatcacagctgcagaaagtgacaaaggtatataaaataaaaaggaaaaaaggtatcatcattgctcccaaaactctggcctctgagactttgagacttgacactggatggtgggattcttttgtagctgccaaaggtatgaaaatgacgtagacatcggcattttgtcttcatcaacaaacatttaagtcagttttccctccagtttgcctgtttgtataatctccaattaaaagatgtttttcttgatggagagagccctaaaacatggaaaaaacatggattttgctctaaaggtcagggcagtcattcccctataacagagcttaagcagtggctggaatgtgccttgtgcctctctgctgtttctgctaattgggctcaggcctattcaacaagagaaggttgtgaaaatggcaggctcccaattagcttatgttttccttaaggtccctctaccttctggtcctaaattcttccagtcatgtatcacaaagtccctgctgcctcttctgtggaatttattagttgcaataaagtgtgggaatataagaacaaagtcagcttatgatctattatctgccaatatcaaactatattctatgctgagtcagggaaacagttaccattaaaaaggaatttgaacttcttaaaacactgtcaaacatcaaaactaaaagtgctgttgttttttgttcgtttgtttcttgagtgtcagagtcaaaatttcagaagcataacttgtgagatgactctgatgtaggattcagctatgggctattctgaacaaggtgattagtcactgaaaaccccggctactctttttggaaatcatattgtgcttgctgctacagacttctaataagacatacaacctatcttttcttattgaagtaaaactaaccaatattcttatagaaagaagattcactatccccgtaagtaggaccaataccacccaaagaataagacaccccagacttctagaggggccagctagcttagcactttaaagcactcttttgcctttccattccttctgcttattcccactggaaaagctgataaggtcataactgccttcagaaacagataatgagagataagcattaagtagaaaacagagcaaaaacaaaaccactggaggcacataaaatctagaactctgctgacctcactccagaccacacgactaaaggaagatggccatcagttctaccctggtgttcccaaattggaaaggcagaggatttttttttttaagcatacaaaatattttttcatgtacatgatgcaatcctctttattatatgtttaatagcaaaaactaaagagaaaaagaaagcctcagaagagacatcaggtcattaaagtcagatgactttccgggaatggttaacagaataaatccataattaaatgggaataattggaatagatttctagtgtataaagcataacctaagattcctcttctgcacaaacaatagtgcttacttctgaaaaaatttgagagggagttttgttttgtttctgtggttcttgtcctcttcaacagattttagtttaatcaattattctgctggatgtgaaaacatcagtggcttctactcttctagtatacagtttcactcaaatcaaatttcaggaatggaacatcatttttttacacttatgccaaagaagatgtttttagacttaggtaccttctcagtccacatagacaactaactcaaataacttcaacagaagcaaatcaaagctcggtctttggtgtgtgtggcttctcaatgccatcccttttgcttaaaaagaaactattttataacaaaattacaaagaatatactacttccttaaaaacaggtctacaatgacagtagaatcataaaagttatatctttatgatataattaagctgtatcatattttagaagctctgggctaccaatctttttctaccaattttgcagtatttaaaaaaaaaaaaagtcctatttagcttactcaaccaacttctggtcgtcactccccatccctgcccacatatcccttgcttaacagatctgactgtgtgaagtgatgggaaactgtgtttcagggaaggtaaagaagggagctcccaccgcagccccagttccaggggtcaagctctatccatcaaaacctatactggtgcttttactccctttgattttgatatgggcagaagagtagggcaattccagccaacaaacatgatcagggatctgtcaggaggttattaggaaaaatgtatttgcttttacaaagagccacaaaaagaagacaaaggccctgttccccttcctctgtgcaaggatgtggctctgaaagaaaaggacaagctagagcacagagctaaggtggccttcaggaaggctccctgaaaaaatgtgagtgaggttgctaagctacagagttaactcccacatattccctagctccagacttcctgctacatatatgccaaacatttcctcattctagattccaggttgtctgttacctgtcctattatattaatacgttgagtatttctaggtaccagccctgattctaagcctttggcgggtattgtatcacttgacacggcaacccctgagacaaggtctacaattatccctatttgctggatgagtaaactgatgtatggacaagtagagtaatgtgcccaaatctcatatatggtaaacagctagtaaccagtcagtctgacttctgggtccatgagaaactatctaaatcttaaaaacatttatttcaaagtaataataagatactaatatcaattagtttaaaaatccgaattatgttgagaaaattatgtttccttcatagaactgccatggctgttttattatttaaaattatttccatcacacaatgtttgtatgctaacacttaatatatgacaaaattaggacatttcctgtgccatcacggtgtgcaaggcaagctgtccctttttgctgtttcatattttaataccctacatccatgaaattactttaggatctttataccataaaacataggctgagatgaaatatgtaaaacatttatgatttctttctacagctgtcattaatctaaattgaaaaacaatttattccagcatttagtcaacaaaatcattaataattttaaaaattaataaagcaactaaaccctctctgagtacccaccttgctttctatccatataaactttttaaagaaaataagtgaccaactaaacaaacacgtggctttttattaaaagcactgaaaaatgatcagcatcactcatcaccagggaaatgtaaatcaaaagcaaggtaggacatcacctcacactggtaggatggctgttatcaaaacatcaaaatacagccgggtagagtggctcacgcctgagatcagcactttgggaggctgaggcaggtgtatcacttgaggtcagcagtttgaggccaccctggccaacatggtgaaaccccatctgtactaaaaacacaaaaaattaactgggcatggtggtgtgtgcctgtaatcccagttactttggagactgagacagcagaactgcttgaacccaggaggtagaagctgcagtaagctgagattgtgccactgcactctagcctgggcaacagagcaagactgcgtctcaaaaaaaaaaaaaaaaaaaaaaaaaaaaaaaaaaaaaaagggccagttgctgtggctcacacctgcaatcccagcactttgaaaggccgaggcgggcagatcatgaggtcaatagatcaagaccaccttgaccaacatgatgaaaccccgtctctactaaaaatacaaaaaaaaattagctgggcgtggtggtgggcacctgtaatcccagctacccaggaggctgaggcaggggaattgcttgaacccaggaggcagaggttgtggtgaaccgagatcgcaccactgcactccagcttgagcgacacagcaagactctgtctcaaaagaaagaaagaaaaaaaagtcaaaatgaaagtgataacaaggatgcgaagagaaggaaaccctggtatactgctggtggtaatgtaaattaggacagcctctatgaaacagtaagaagtctcctcaaaaacttaaaaaaatagaactaccatatgatccagcaattctgcttctgcatatatatccatgataaataaaatcactatatcaaagacatatttgcaattccatgtacacagaagcataaattcacaatagccaagatatggaaacaacctaagtgacctgcaaccgatgaatggataaagaaaatgtgatatacactgcgtgtgtgtgtgtgtgtgtgtgtgtgtgtgtacacataaatgtataaaatggaatattattcagcctttaataaaaaaggacattctgacatttgtgacaacatggatgaacctaaagggcattatgctaaaagaaataagccaaacacagaaagacaaaatctgtacgattttacttataagtggaatcttggaaaaaaaaaaaaatgaactcatgctaacagagtacgatggcagttaccacagggagttgggtgtggaaaaaggaaaaatattggccatagggtaaaaactttcaattgtaagatgaatgaactctggagacctaacgtatagcattaggtgagtctaataaacatattttatacttgaaatttgctaagaagctaggcacagtggctcatgcctataaccatgacactttgggaggccaagacagtaggattgcttgaggccaggagttcaagactagcctggatagcaaagggagaccgtctccacaaaataaaacatttttttttaattagctgggcatggtggtgtacatgtatagtcctagctaccagggaggatgaggtaagagaacacttgagcctagaagttcgaggctgcagtgagctatggttgcaccactgcactccagcctgggtgacagagcaagaccttatctcaaaaaaattaaattaaattaaattttaaaaaatttgccaacagaatagatctcaagtgttttcaccacacatacacacaaaattatatctatgtaatgtgatggataaattatcttttttttttttttttttgagagagagtctcactctgtcgcccaggctagagtgcagtggcgtgatctcggctcactgcaagctctgcctcccgggttcacgccattctcctgcctcagcctccccagtagctggaactacaggtgcccgccaccacgcccggctattttttgtatttttagttgagacagggtttcaccatgttagccaggatggtctcgatctcctgacctcgtgatccacccacctcagcctcccaaagtgctgggattacaggagtgggccaccgcacccggcagataaattatcttgattgtggtaatcattgtattaatatatacatatataaaaacctcatactgtaccctttaaatatatactatttttatctgtcaattatacttcaataaagctggaagaaagcacaattaaaattataaaacactgggattccctactacaaaaaacccattgtgagtcaataaaaacaactgaagcattaaaaaaaaaacactgaaataattaactcattggaggtggggggaggggggagggaaagcattaggagatatacctaacgctaaatgacgagttaatgggtgcagcacaccaacatggcacatgtatacatatgtaacaaatctgcacattgtgcacatgtaccctaaaacttaaagtataaaaaaaaagtggaaaaaaaaaagtaactcatcagatacattctgagtcttccatatgaaaggaggactttgctaagtgatgcaacaactttgtaaatagtcattcttcccaaggcagaaaacaattatttctgagtggtaaacaattctgatttcacgaattgtaggtggctgcactgcacagtgaaacagataactctaaagactgataaacctaaaataggtccttgaaatttatgaagggataagtgcccaaacatgacaaaataccgtaatctaaattctaaaacaacaccataggatatatttctctcatacagtgaagttaggtacaacagaaagttttaatttgcgtcttcagatccttggacttactgcctattaaagaagagaagagtcttgaaagtctactcactaacagcatgattcactgccaaacatctgtgcctctgtagcattacaaactctaaagccctgaaccttcagaatgtactgcaaatattcataactgctcacaataaatctgtgatcagagaccagccagaaatatcctgcatttatgttagataaactctgacatagagattggtacttaactaaagtttgttagaataattaacttttaatcatcaccagtgattgagatgggagaaacatctttggggtatgggacaggatgttacagcaatgacgcacatataaggatttgtcatgttacctgttcttgtttctccagccacttgcccaccattgggtgactggcactcagagacgagcgagcattgtctctctgaaattggttagaccagttactagtatcccgcgggaggcttctgtagttttcatctttctattcaaaaagaaacaaaaaggtgtcttgtaaaaaaccagaccttgcaaatcagtaatgcacctggtttttcaaaagtagcagaaaaatgattctacatatttaaaacatctttccaatcctatacaaaatagctgattgaggacattccacccagattagacctcggaattataaccatgtgccgaggacaggcaagtctaataattacagcaggaagggtggcacacacacggcacacaacagacaaaacactacactttgcactcctacccaaatcaatcacctaaaccaagtacgtacaccaaaaagtgaaaagtacttctatacaagactttcactctctctcaactgtggcattttcccttctttccagtctcataattaaattatgaggtaccatcttaattcatcagaaatgctaaaaataaggaagattaataaatttgccctttcttcaaagccttatggttttgtgatttttggataagagatttagattattcaggctgtttctattacctacttcacaagatagcagtcagcattaactcaaacatcaggggaaaaaactggcctatcactattatttgttacataacagatacgtaattgttcactgtgacatggatataacaagcgatgtctttacataaatatttatcaactaagtttttaatactccccagaacaaccaaatgctacgtgatatttctttcagataaaaaattataataacttcctttggcttatgagctgtaaaacctcatttcaatgttctgaaaagaaatgagaaagctaggataaactaggggagtcaaactttttagttcaaagacgaaatctaaatcatctcctataagaacaaagtaaaatattaccttcagttggatccacttaactcagtacaccaagttagaagaagtactggcatattatccttagtaacactgttaagagtaatctggctataagtattacatgtgtgattgatacttactcttcatgtgctaaactatatgaacacccaatacaaacacagaaacaaaaaagtgcaatataataggtttgcaatgtataaaacttagttatagatcaggatactatttgctcttccttcatgagttccatcagggaataaaacttaaaaatgaattgatagtattgggtttatgtaaatattgggacatatgttcaaacaaaaggaaattgataaacatttaccaacataaactttgacatgaaacttcataaactttaagaattaacctgcaagaaacaaaatctttaaaaactcagtagcaagatgaaactttagcagcaagttttttttttttttttaatagaaatggtaaggagaagacatggacaaaaactaactaaggaagcaaactagaaactaaggttcaccgtatctcaagatactaagagtctctccttaaaacttaagcttcagaaaaaaggaaaggaaataccgtttcatatgatagtccatagatacattgataagcttattctgataagactttcttatactaataagaaattcagataagtcataaagggtagacttgttaatgacagaactttatttattagtgacagaaccttatgtgtcgacaaagagaaggaggaattaaagtacactgaaatgcaagtataacttttatgtcaaaaataaaaattgaggctatcattgactagggaccaggctttcatactcatttcccaccatttgaggtgattattacaccaactgcttacttagagaatgaataattaacccaaaagtatttttaaaaatctaccctctcttttcagtaggaactgtatttcagagaaatcaacagtaccagttcatgaggggaaacctgtcttttcagaagaatgccaaataatggaaatagaactaataacagaattagaaatatgaccattttcaactcctaatgaaataattcaggcaaagataatcatactaaaactattatgttaagagttgatagataactggatatttgcatagtgacaaaatatcacttgaaaagaaaaagatctacttttgaaatgaagagctcaggctccacacaactctcaccttttggtgtctggagtccagtatgctactggtacccacccctctgctccttcctgaatctatgccatttttcctcttcccgtaaatggtcttgttggcgctatggactgctgattattatctctctggacaagctcaaaaagtgcacaatttcaccacgtcctaccctgacaacttttaagcacaagtcacgaaaacgaaactgtttcctgaattcatgatctcagtttccaacaagaggtcccaaagatacctcgaaactgagctccctattttgactcaggcaccattccctaaaacatttagaattagctttactctctttcctccctctttgatctccacagcttctaagtcttattgatacaacatttttgctgattttggtcctcggccataaacctagttcaggatcaacttgtctcttacctgaaattttaacagtggccttctaactggacacaggctctggccatatcctctctaacaatgttctgcaccactttctggcacaggagtttcctaaaacatatgttggatcacatcaaacctccagcaaacactataggtagaccagagggaatttcagacaatggtgcttactgtaccacacaaacttcttcaccttcattcttgctttttttgagacctgtacttccaacatcatttcttctatagaaatactgaacattcttcaaagcccagttcaaacgctattttctaagaagcattccctgattctcaatagaactaatcatgccatgctttttgttaccactctgttctaattttactttaactatggttctaacttataatttagctaattttaaaaattgctatttctaatcttacagggaagcctgggcagatcatcattcacctttaaacccaagcactcagcacagtggcttacaccaatgtggatgactttttcatgaatattttttatgttccctatttcacatggtttcaaaatcctggaattttaaaagaacattttgataagttgttttaaaaattgtttagggaatgcttcaaagaggcattaagataaactttagtaaaatgtattttcagtgaaatgtaatcactgtatttttagatttatactaaaagatgtataccactgttatatgcctatttcaacttcctgtcacacctacagcatatgatgtctgtggcaaatgtgattatttccaaatgcatagaaaaaacagtacactgtttctccatgtaagtcaattatgacatgcagtacctgcagcacagcaacatacaataatcagactaagagaaagaatggctgaagatggcaaggtctgcacttttccactgcacttgaagaattttacaattttatatttgtggaatcaactttgagttcatggataataaaactaaaactaacgttcactctcataacaaaggaattttcctaattcatgtaaaatcaatgatgaatccatatattgacttatgtataatgtatgaaaagtgcagttatttacagcaatcttgaattattatcaatcagttgaagaatttttaaaatacattattaattcctatcaacatatttgttatatttttgacagcatcatgcaggtcctactagcgtttcagtcatgtttcttcctcccagtcctgaagtctggccacaaatctagttcaccgtctactgcatacaatgtgtatcaagtgcatacaaggactgtaggcctgtaaagctgtgtatctgtatttatgatggaaagatatccataaacatcgcagcatacaatgtattaaatattttctacaacacaatttatactagataccactgtccactgaaatatacatcatgcactctattttcaatttgaaaatatttgctttagcataaataattgttaaaatatggcactcgtaaccaatctattcaagactatatatgctcacttatgaatcaaattataactataaatcaaaaattttaaatcaaatatacataattctaatgattataaaacttactaatggcataaattaatttgttagagttatgactttatttaaaagattatacaaaaaaaaatgccataagaaattactctcccgtttttaaattataactttaatcctccacttatgaggctgccccaaatagctgctcagctttgtgcgaggtgggaaattttccttcttgccagggaaaaacagatgttcctgctgtgatcagggatcttccttatcatctaaatgtactgccacagcatcaggtgtcaaaaagccactccggctgggaaatgcatattaatttgctgctccctggtagcggtatcctggctatggagaaaatctctttcagggtaaggaaagtaagtgtcttctcccaccttagccctccccaagcttattacaattcaggaaaactatatagagcccacccaatgccttgagatagaggctcattcccggcatactaagctgcaactccaagctttatctcccagaaacagctatttagctgatggtcagatttcttggcaagactatatccctctgttgcagaagtcagaactggggtttcataagcattatagaagtcataaacatttctgtgttggcacaggaaacccaactatgtttccacctcgtttcagtgcaaaaatctcattttttttaagaattatgagaaatcatagcatattttgaaatacaaaatactcaatgcatatacatttcattcagaacctctatgcatcatatggtttcaaatattcccgtgtgatgttaagattttacatttcccacatttttcagctctgcaattatggtaaaagagaattcaatgttctgcttaattatttctccaggaaatgatacacaaaaaacaaagggaactattttcaggatatctaatctgaaattaggagactgaagtaaaattaataatgatggcttagaatgattttttttgagacagtctcgctctgttgccgaggctggagcctcggcaacaatttatttattcatcttctaaaaaataaataaaaacagaaaaaagagacagataagggtgaaataaaatgactcacacacacaaaacgcaggcttaatcaccaacttgtaaatgaaggcagaaaattttggcagttcctattggaataataaactaaatgcctattaagacttttttttaaataaggaaacccagaattttattccaaacacagtattcattatcatttaccctaggtgcatgtctattcctaagtataatgaaccaactaaaaagcaatatttgaaatccatgcaaaccaacttcctatgtgtaatgcctaatgttgtagaactgaggccaagtaatctgttcctatattatctgtaattcctaagccagtatccagcacataatcagcactggtacatgtatacatcttacttttcctttttgctaacaggtttcccccacattcttaataactattaatgagaggtatggaaaagacaaatgaaagagtatgtgtttataaagtttttataacagaactatggcaagacaaagaggaaactcaaacatccatacatttttgtcaaaacaaccacatcgggatcattagtgataattaatagtttgctaaactatggtggagtctgcaaccagaaacactggtcagaatccagagattttgaatgccaaaagacgtattgcagcacctctttagctcaaattacttaagtaatatttcatttttaaatgtcaattttcttttttttctgagacgaagttttgctcttgtggcccaggctggagtgcagtggctcaatctcggctcaccacaacctccgtctccctggttcaaacgattctcctgcctcagcctcccgagtagctgggattacaggcacccaccatcatgcctggctaattttttgtatttttagtagagacagggtttcaccatgttcggcagactggtcttgaactcctgacctcaggcgatccgctcacctcggcctcccaaagtgctaggattacaggcgtgagccaccgtgcctggccaattttctttttcaactgagttaaagttttgaacaggagtaagtaaaaaaatttgaaaataatttttccaagcaaattaactatccaacaaattaacaatatacaaaataaaatatcctaacatatatatcaaatttttactaggatttttcctttgaaatgttaaaggtattatccatagttcttaaaactcattctgacctgaaaaatgaactatatcattcttcacatttgataatatcttttctagtcattctgatacatactcagtatcttctagataataaaattcatttaatttggtgaggaactcaagaattctgaatatgccaaaaaattttcacagtggaattctaatatagaagaatttctatattagaaagaatttgaaaattacaactaagtttccaaatacaattcctgtcatggcagcaaacccttcaagttgatacactgacaaaatcagaagcatgacattttagttttaagtcataacctgtaactggccagtatcttgttaacggtcttatcaaacaagaaaaataatcacaggagtatggatctgtatcaggctatgaacataaagggatccaatatgaaaaaggattggtcaaaaatctctcctggagatgcaggtctgatcaaactaaaacgggcgcggatttctctgaagccactggatctgtccagagagccaaccagggaatccaaggagaagagaaagaccagcaaaactcaaccacatccaggatgctcgtttgaaccaattttctcagctgttcctaatccactttgacagagaaggaagccatgaaaaattttggatacagcattttaaagctggaaggaagaagctagacaacagctaggttaacctcttactgactgaaagaagaaacagggatctggagaagtgataacaaataaattgtggagatgaggatgacaacccattctcatggttacacctacccacctcaatgcccaaattctactcactcaatttcctttttctttttttgagacagggtctcactctgtcatccaggttggagagcaatggcacaatcttggctcactgcaacctccacctcccgggctcaagcgatcctcccatctcagactcccaagtacctaagactacgggtgcaagccaacacactcagctaattttttaactttttggagagacaaagtctcactatattgccgaggctggtcttaaactcctgggttcaaaagatcctcctgcctaagcctcccaaagtatggaattataggtatgcaccaccagcctagcctctactcaatcctgagtaataaaatttccaacttctcattcttaatctaacatggaaccatagtttaggtggctaatgacaaaaatttctgatatctagtcactgctacacaagcatcccatcacatgggaaggtagttcttgaattcaaaatgatgatatatttgatcacaaattatattttcatagagatggttggttcactaagaaatactatacagtgttacgaataatcatacgtaaaatgttggctttaaaattgtctcatttcattcttaaaataattttttaattttgttttaattttttatttattttttggggagacagggtctcactctgtcacccaggctggagtgcagaagcacaatcatagctcactgaagcctcaacctccccagctcaagtgatcctcccacctcagccttccgaatagctgagactataggcacacatcaccacacatggctaattttttaattttttgtagagactgagtcttactatgttgctcaggctggtctcaagctcctggcctcgagaaatcctcccatcttggcctcccaaagtgctgagattacaggtgtgagccactgtgcccagcctcaaattattttacaaaacaaagatctgattaattccaggagcttgagactgtagtgagcaacagctggaccactgcaatccagtctgggcaacagagagagatcctctctcaaaacaagagaaaatctctttccaggtataacttagattatcttctttatcctgggaaaacatgcagaaagaggtgaggaggaaatagatgagggaagtttaacgtttataaaaaattacaaaaatgttgtccactcttagactctgaggaactgaaggacagagcctaaaggaaagccgcatgaaccacagcctccacttgctttcctgcacagtatttcataagggccaacatggcccctgaattcccctagagccaccagcattccactatcagcagtgggcaggaatggagaacacgggaccaccatttttgacctatactccttaaaacaagaagggtgagtgtgtgaaagaataaataaataaatatttcgggttcaattaaatcttgaagatcttgactcactttcttacactacactaaacatgaggagcaacatttgactaaaagctgcttaactctgaaaaacaaatttatactgaaacaatttaaaaacattttagaaagtgcttaactttgaaggcaagaaatacgcaacaacatttcattttctttcttttttttttgagacggagtctcgctctgtggcccaggctggagtgcagtggcgtgatctcggctcactgcaagcaccgcatcccgggttcacgccatcctccagcctcagcctccagcacagctgggactacaggcgcccaccaccatgcccagctaatttttttttttgtatttttagtagaggcggggtttcaccgtgttagccaggatggtctcaacctcctgacctcgtgatccgcccgcctcggcctcccaaagtgctgggattacaggcgtgagccaccacacccggccctcattttctttcaaaaatgctccactctaaatatgtatgctccaaaactaaaattataagtaacaatagcattttgcatcaagaatactatgcacaatacaaaaagaagggaacagatgctagacagaaagggagagatagtaaaatacttatagtggttgcctaattccaaaatacctacagtcttatacattatttagatgtgcatcataaatattttatatttatctaaatatttttcgtctgaatttaaaaacgaatgtatatatacatatatatttaaataaattactacaatttgaaaatgaagagatttaaatcacatataactagtctgacaatgtaagataattaccactttcttccatttttcagcccacaatccaaactccaatggactggatggatgcgtagaagaattgggtaatttctgtgaaagtccctaggtacagtctaccttagctttccccttaattgtgaaagtgcctcctcaggtacactgtctccacagatactttttatcttaatgtagaaagtgcttattttcatttatcataatcttatcctacatattgtttctcataagtaatgacttttgtggagaattacattgccacatgggaagcatttagagtaaagaaatggatggcacaaacttctaaagaactgagttcctctctaccaccccattagcagaaaaagcatgttctctaaaaaggatattaatattcaaggaaactatttctgtcctccattcatggctaaaaactacaattttagaaaatgtgattcagggaatttgagtaacgtctattgaaaccttactctccccttccccccaaaaaaacacaatctaactaaagtcgaaataaaacagatattgcaacaagatgccccaataaaaattaaatacaaaagtgcaagtacccagccaagagaattcagcacatttatatcacaactttatcatttaacagctggttgaactattaggtgtaacatttaacagctggttgaactattaggtgagctatttaaactctccagggctctacttgctcaccaataaaataggtacaaggccgggcgcgggggctcacacctgtaatcccagcactttgggaggccgaggcgggtggataacgaggtcaggagatcgagaccatcctgactaacacggtgaaaccccgtctctactaaaaatacaaaaaattagccgggtgtggtggcaggcacctgtagtcccagctactcgggaggctgaggcaggagaatggcatgaacctgggaggcagagcttgcagtgagccaagatcacaccactgcactccggcctgggcgacacagccagactcgtctcaaaaaaataaaaataaaaataaaaataaaatgggtacagcaacagtacctacacttctggtataggtataattaaatgatatataacatgtaacataccaagcatggcataatgcctaggaatagcaagtattcaaaaacaactttgttatcattagtgaaaatattaaaaccaagaaaacagatttggcttataggtaaaatagatggaaaccacttctactaccaaatttcgagaaacactgactggaacacatttctccaaaggcagcccagatcataacaggagcaggaatatatgcaaaattaaaagaaaggatgtttaaagtccttagaatgcaaacaggtgctccagttgcagcaatccatctgatactcttcttgttaataacaggacctgaagggactagatctaacttcacaactcaaaacaggtaggcttataagctgaattataaaaaattaaaaatagaaactagcttaaaaagatgaagccaggcatggtggctgatgcctgtaatcccagcactttgggaggccgaggcgggtggatcacctgaagtcaggagttcgagaccagcctggccaacacggtgaaaccctggctctactaaaaatacaaaaaattagccgggtgtggtagtgggcgcctgtaatcccagctactgggggggctgaggcaggagtttcgcttgaacccaggaggcagaggttgcagtgagctgagatcacaccactgcattccagcctgggcgacagagtgagactccatctcaagaaaaataaataaataaataaaaagatgaaatgagatcaaatgagattaaaatattttttcaatgtatatagactacgcaaaattttgttctatataatttaatcaatgatacttcctggttctctcccctaagtcaagacaatcaggtataacatattcatttccctctgtgatgtatgtaactttaagggcacacaagaaggcttctgactttattcaggatttatactcctgcagtggtttgtgaactctaaaaatatcgcatccaagctccaaaattttatcaataacaccttaggattttatcactttgaacacaaaatatttaaagcatatgaaggcagactgtattcctaatgtagcatagaaaaagatgagactaggttatcaataactcagtgagcccagcctattgtagaaatgattataaccatactgactgaaagttcgaaaatgtgctgcattcaaataagatattttaatatgcaaaatagaagggtaaaatttatagttatagagacctctaacaggaaatacaaaatgttgcagcagaatagtttaaagtctgttctcagctggatctcccttgaaactaatgccgcagaaaattaaagagagctacaggtctgtcacagaggacatgtgattctaaagaactatctcagctcatcctttaagcttttggatggttaccataatgctggaagctatgcttggctcacaaataaccaaacgataaacaacttcttctcagcagccaactggtcaagtgtattttgtggtttaaaataatcttcttcaaatccaacagaacataaagggaaaaaaataaaataaacttttaaaaacgtaatttagaaataaaatagtgttttcaaatttactaatatgacagttggccttgtaaattagaaagaatgaatgaggagaagcagaaatcaagaagtcaaactggtgcaggcgcagtggctcaggcctgtaatccaaacacattgggaggccaagatgggaggatcacttgagcccaggagttcaagatcagcctgggcaacatagtgagaccccatctcttaaaaaaaaaatagctgggtggggtggcccatgcttgtagtccaagctacttcatgggctgagatgggaggatcacttgaacccataaagttgaaactgcagtaagccatgcactgaactccagcctgggcaataaagcagagccagacagtggcaaaagaaaaggaaaaggaaaacggaaagggaagaggaaagagaaggggaagggaaagggaggagaaagggggagaggaggggagaggggagggaatgggagggaaggggagagggaagagaaggggggaagggagaagcagggaaggggaaggggaggaaagagaatggggaggggaagggtaggaaagggaacgaggaggggaaggggaggaaagggaagggggaggggaaggggagggaaagggaagggaagaggaaaggaatgggaaagtgaaggggaagaaaaggaaaggaaaagggaaagagaaggggaagggaaaggggaaggggaggaaggaaaagggaaaggaaagagaaggggaaggaaaggggaagggaaagaaaaggggaaggggaaggggaaaggaagggaaagggaagaggaaggggaagggggaagaggaaggggaacagaacaagaaaggggaggggaaagggaaggggaaagggaaaggaatgggaatgggaaggggaaggggaaggggaggggaggggaggggaggggaaggggaaaaggaagggaaggaaaagaaacaaaggggttttgaaaggaatgaaggaacacacagaaacagtagacagaaacattgttttcattaaggcttctatctagaaagatattttcagttatatttttgtattgatagtcaacatccaatattaaatgagttgtaggacttttaaaagactcaaaattaatttttcatttgaaaatgataaatttgtgcaatctaagtatgagaggaagtgaaatgtcacaaacccaaatacagcaaatgtactagattctagtctgcattcgcttaaacaaaagatatctcaaaaaaaacattatacagtcatgcaccccataacaacgtcaatggaccacatatataatggtgatcacataagattaaaatcctgtatttttactatacttcttctatgtttagatatgttggatacacaaatatctaaatatgaatgcattgtgtcccagctgtgtattcagtatagctacatgctatataggtttccagcctagaagaacaggatataccatgtaacctaggtgtgttgtaggctacaccatctaggtttgtgtaagtgcactctatgatgttcacacaaggatgaaatcgcctaacaatgcaattctcaggatgtatctctgtcattaagcaaggcatgactatattcctatttgctctcccttaaaatgtaaccatactttgttttcagctagacccgaggtcctgcgggaaaaaaaaaaaaaagaccgagccctgaaaaccacagaagagctttaaggaagcacacaaattttctggagtgggtaaaggaatctgttggtgtgagtaatgcctgtgtttcagctcttggaagtctacaggtaattctgatgcacacccatgtagaacctttaagctatctagtaagacagtaagttctggaactcaggaatagtaccagctgcttgtttccttcaccaccaccctcaagcctcactcctatcctatttatctaggacttctcagagcattttatacatcctaactacttcatactttattagcctagaatttatgtgaaacaattactaatagctttaaaaatgttcatctccttaccaaataagtctactggaggaatctagtcaaagaaaataatcagagatgccaacataaattgataaataaggacattctctgaagggtacttctaaaggttacttataaaagcaaacaaaattggcaaaaatataaatgtcatacaacagaaaaaaccatcaaataaagttaaacattaactataagaactcaacacataatataacattatgtaaactatccatatttatgaggcataggaaaattctctcaatacagcagaaattggaaacattgcaggaaattaaactatacttggatggttccccctggtaataagaatagccaacatctgtatagagccatgctccacagaagtcctgaagttaatacatcaaaatgtcattactactcatcttcaaaatttcaaattacaatcatccctcagtatccatgggggactggttccagaaccccttgcagataccaaaatccatagatgctgaagtctcttacataaaatggtggactactgcacataacccatgcacatcctcccatatagtttaaatgatctctagatgacttatatgacctattacaaagaaaatgctttgtgtaaatagttgttattctgcattatataggaaattaggacaaagaaaagtttctacgtgttcagtacagacacaaccattgtttttttgttgttgttccaaatattttcaatctaatcttggttgaatccgtggatgcagaacccatggacacagaagcctgatggcatttccctgcttctatatacccttcattaccgtacatatgcaaagagcaagctgtattactatcagggaaaaaaaagggggttggggaaccttgaaaaatacttcaaaaatgtttataaaaataatttcctaaacttagacaaaacatctcacccttctaatagaaagaaaagcgagatgacaaagacataactaagaaagcatctcttacaagtggttgtgtgtatcgggggtattggaaagatagcaaacatgctaagcaactaaaccaaacagaaataataaacccaaggggtaagaaacattgcaaggtctccatttaaaaaatcaaaagaaaaggaagctaatgatgccaatgcaataggttccctttattactttcttcccctttccctaatcaggtgagaatctcttttggaaacttgtccggacctggtttttatactaagtctacctatgttaattgtttagggggaaatatcatttacaaaaacaatgccactcattatttagagggaaggaacaatggcttgtagcaactgcacagtgaaatagtccacagtccttatccccggcactgcatggaaagcagattcttctaagagctcattacatctttcttgatgggataaatcacatgctctccacagactagctggcctctttattcacagcaacactgacttaataaggaagaccaaagaggtggcaagatgatttaagtattcacaccgattgaaatactcttcctcaggataaaatattaaccacatgttaactctcaaatgaaaatacagcctctagcaagaaactttccacacaaagtatgagcaaaatgttccctaaaacagttggaaaaggtagtcagccacaaaatactggacacaaaggtgagtatttcaaataactttgaaaaaagccacaactcccttaccctctccatctcacttccaaatgaaaacatgaaatattttaagaaattcagaagcctatgggaccctcggcctcttcaggccctcaagcaactgagtatcatcatcatctgtacactctgcccactaagctaatagtggaatgagattatgaccactatttcaacaaggaagactccacctctcgtttgtgattttgaaccaaaggagagagtttgacatgatggtgctctaacatatcagaatacaactttcctgcttagaaacaagattttaattgattggtaacattattctaaaataatttactctgctcatttaacttggaagaatataaaccacttaactatgtagatgagttatttaagaatgttaacttattttaaccactagagatcactaaatcagagggctatgaatgcacaactaatttatttctacaattttatacagaaaacctgaaccactacagactcataagaatttataacatcttaaagcatgagaccataggtaagctctcctgggcttaacagaaataaataaattgaatgctttgtacctaagcagcaagtatgctttccttccttctgaatattgaaaagatgaggaggctttttataactgaaaataaaatgccatctaatcatatttatatatgagctctcagactaaaatacaaacagcataaaacgcagacagcaagattagtatttgaagagtaaagccaacgaaaattcaaaatactaattcattacacattactatttaagtatatcatatgcgaatatcacttcatctaaaaatatgtatgtagatcaaggcttttcctatgggaaagtatgggcatctggttacattaaatactgctccatggaagtaaaaagattgctgaatatttaacaatttttaagataaatattatatttaaggatgtctcacaacactgatacttaaaatgtgaaaaaaagagaaagagcatggatgtccaaaattgagagaaaacagaatacaatctacaatgaaatgttttacactcattaaaatattgataataaaattcacaccagggaaaatccctattgtacgaaaaataatgttgaaataatcaggatgcaaatatatgaacatagcatgactccaacttgtgtgtgtgtgtgtgtgtgtgtgtgtgtgtgtaaatactggttgttgctgggttctggagttatgaataattttattttgttctataagttcgccaaattttctacaatgatagtagcatgtcatttaaaacaacaggctgggcatggtggctcatgtctgtaattccagcctttgggacgctgagatgggaggaacacccaagtccaaaagtttgagactggcctgggcaacacagcaagaccccgtttctaaaaaaattaaacaaccagccaggtgtgatggctagtgccagtagacccagctacttgggaggctgaggcaggagaatgcttgaacctgggaggtagaagttgtagtgagctgagattgcaccactgcactccagcctgggtgacaaagcaagaccccatctctaaataaataaataaataaataaatatttaaaaatgaaactgcgtcagctaggtggatgtggttaattggcagtgagagtctcagtgctctcctaacgtgttcctgtgctgcagaggttttaaggctaatgttctacttcccaggctcttctgcagagaagggtctagatacaaactgaactccacctactcagattcagtagcatgagattttaatagtggtttgaaacagaattttcctgggctgtgatgactggcagcatttctagggtgggtctccagcttcacaagtgacagaagcaagttgagtacacctggaggcagggtggtgtatagtgtgtagtaggcaggctccggtgggaggagttcaggcccctggactgcagcacctccttcaccacgaaagcagagagggtagctccacaggcaagccacatgtttgttactgcatagttttaaaggttctccaggaccacctaggacctgctctgcaaacccttccagtgattttgtgagaaaaacattctaagtgataaattccttttgttcaaaaatgttttatgataaaaacacgttctgtttgctgcaactgaaacggactcacacatccaagatgttgaatgacttgaaaagaaacttccgtatgtttcaaacagttgaaaaccaagttaaaaaaatttttttaaactgccagcttgacttgtttacacatttgtgaatatccatgtaaattaaattaggtctgttctaaaaaaagattaactgccatgagacccactgataaactggattctgcttctttggatagtctactgcaagataaagtcctcaaaacttacaagctaatcttaatgagaagatcttccaatatggctcctcaacacatctataaaaacaaagtatttcaggagactaagcctaacagttaagttcataattcaaaaaaaaaccagaaactaaatatactctttttttcaactagattcttctcagtttaaacctatgttttccatgtactttttttgtcactagaattactacagagaggagtgtgctgaaatgcaaaccaaagttgaaagaaatatttaaaacaggtatttttatacctatgcaaagaataaatcaagcaaatatcaagctacatctttttcatcttatgtgattagtattattttgacatttctcaatatatactgtgctaacttactggctgcactgaaaaaatgtttattaattctttcaacagaagtttattgagcatctacagattcaaaagtgaaaatgacagattcagcaaaaagcacattaaataagaggtgagaagcgtgacaaaaaggaacaataagggttctgacaaagagcatcaacatttttttagttgttgagatggagtctcactctgtcgcccaggctagagtgcagcggcgtgatctcggctcactgcaacctccgcctcctgggttcaagcgattattgtgcctcagcatcctgagtagttagaattacaggtgcatgccagcacacctggctaatttttgtatttttagtggagatggggttttgctatgttggccaggcgggccttgacctcctggccaggagttccacctgccttggactcccaaagtgctgagattataggtgggagccaccacgcccagccaacaaattttttaaaacagacaaaacaagctaaaataaagtttctttattcagattaaataaattaggtcaaggactaaaataaattaggtcagggaagaaagtattatgaagactagacaacacacttccatttacaaggagacttaggataaaacgatcaactgtgtaatcaaactaaattaccatgaagtccactttcatccttaaaagttcataatgttctaagttccttaatgtacctcatgaaccaatataaatatttgcttataaatgtgtcaaatatccctgtaagaacatagaaaaagcaaataaagaggttgcctgtgaggagaaatgggagaggagaccaggagacacagcaagaaagggactttatatggcacataatgtgttgaatgttttcatttttaacgatatgaaatggaatctattcaaaaaatggatatattaataagtgcacaccatacacggcactgattttcatcagaaaatccaagtgtgatataaaataggagactatctgaactttgatatgaaagttggtaccacgctcacaaaaggccatcatgaagatgccctggaatccaatggtttacccaagacacgacactcatcacggacaccaagaagtcaggaggggcaagagacagcagcaaacaagcagaggtggttaccttcctgtcgcaggttttaggactcccagcagtgttctgcttgaggaagccagctgttgttgaccagcgtgtgggatttttccttgaaggctcttcagaggaaaaattactatcactgacagaagtggagaggccaattagagctgggtcactactgcgtcgaacatgaagaggcatatctgtaaacacaaaagcactatgctgaaaaataagatactaatgttggtaaactacatgttaggagaacgtagggaaatcctaaagattaaggaacagaattacacttttgtaaaaggggacaagtgggtcagtattctaaacacaaattcctttaggtcctttaaaatactacacggtgaaagagatgcggtcaagtgtcggctccgagcaaaatggcccaggtttgtacttggacttcactccttgttatctatgtggccctggccaggttgcctaactgttctctgcctctagtcctttccaactcaaatgaaaataaaacagtacctctttcatcagggtaatgtaaggactaaataatataaaggggttaaacagtgctagacatatagtgtgtactcagtagagagtaatataataaccattactgtgatcattaccccaatatttctaaataatcatcacatatatcatttaaaaaataatgaatctaagcaagtaaacaaatttcacctaccttttaatcatatctactgtaataaaaacacagaatctatatagttaacaaataatttattgtatatttcaaagtagctagaagagaggatttgaaatgtttccaatacaaaaaaagataaataattgaggtgtgaatatcctaattacctagatttgaccataacacatggtatgcatgtatcaaaacatcacatattctccgtaaatacataaaattatgtatcaatttttaaaaatctatagaatctagacatttggctgctctactgaaaaattttgttgaataaaatgtttcttttgttcaataaagtattgtcagaaagtgtagtgcccaaatatattatttatacttaagacagaaaatactcaaagtaatatgttaatctgcaggtagtttctgtcatatactcacatatacaattacacgaaaggtagtattttagcaaatgtatttgcatagaagagcttgcttgcaattgctataacagtatcaataatacactcaggtgaacatttgtatcattatcagtaacaatgagaacagcctggcaaataggatcactgtcacagcagagaagaaacagaattaaaaatgcaaagtgaagaagaaaagagtctgcaatagctgcaatcagaactaaaagttccactcagcaactgagtgaaatcactcaaaaacataagacaaaatttaaattatgtttagaatactctgtttttaaaaactaggatgtaagtatttgttttaaagcctctaacaatacagttttactgactgattgactggttgagacagagtctggctctgtcacccaggctggaatgcagtggcacaatctcggctcacagcaaactccgcctcctgggttcaagtgattcacctgcctcagcctcccgagtagctacaggctactacaagtgtgcaccaccatgataagctagtttttgtgtttttagtagagacggggtttcaccatgttagccaggctggtcttgaactcctgacctcaggttatccacccgcctcggccccaaaaagtgctgggattacaggcgtgagccaccacgtccggtctaatgacatagctttaaccatgaagcagtaaactcatcatttgttctaggagggatatttttgaaacactggtgcactggtcaatggtaaagatatggaaaccttgaggataccaaacaggctatttatatacagtgaaagctgtatttaaaccactgtcaatccaatagtctccaatgtgaaagcaaattagaacttatcagagcaaacagaagcatatgaaacatagtaataacaaatttaacatggacttctacatcatgaggattcaataataacaacacagtctgagcaacgttactagggcaaaaatttagtcaactccaaatttaatactttggtggctatcttaatgtgctgagagaaacataaacatgaggattttaataatttctggattttagtgtctgtaaacattcatgacaacctttgctgcttattaatttacaccccccaaaataaaaataaacaccaataagaactatatagtcactcttagaacaaggtcgcaaaaatacacatctaaaaattgatatgcattaatattacaatgcccttactataaggaaagttctctaccaagaggaagcaaaatttccagaatcatcaaattaaaaactgtaaggaaaaaagcaacaaaatggggagaggtgggcaggaaaactctaaaaacttttagacaatgttattacttagacacagattctgttgctgtccaattacagggttagttattcagttgttaggtacctctgtacacctccatttctctccctcttctgtcacccatctgtatgtaagtctacaagaggcactattaactcagaagaggaggcctttaaaaaatagcacaaacataggaccaaaagcagtacccaatatctatagtaaaataatcaaagaaaagtatattctaaccccccaataaattcaaggactgaattagcttggacacaataaaactgcttgccctacttgtgtttgaaattttcctcaggagaatacattgcatacatgattttgattaaataattaagaccatcttcttaagattagacacaaacattgtgttaatgtgttagtctgcaacagacagacaaaaataattagcatttatctctatatacctgtagctctcgaaataaaatatggactgggggaaaggggatttgagaagaggaagataacagagggagctccaggccctgcgggatgtctcttatggtgggtgatggagctcatggatagggtggtgtttgcataaactgcaatgtgaaggctgctacagcgaatgctctatcatgcagcccttcttgttagttcttccaacattaaactttttgtttgcatttcagcaatatttataaaataaattaaaataaatacagtctggatcttctatttgcactacctcgtcactgagtactcccacgcaatttcaggtgccacgtttacatttatgtccactgtcaaattcaggaaggagtcctagatttgattaccacgctgatgagaaagaacaaaacccaataaaacaagtcaacgaggccaggtgcaatggctcacacctataatcccagcaccttgggaggccaaagtgggagaattgcttgaggtcaggagttcaagaccaacttgggcaacacagtgagatcctgtctctacaaaaaataaaaaaaaaaaaaatagacaactgtggtagcactttcctgtagtcctagtgtaggaggcaggacttgactgcagaggcagggcttggacaccagaccaaactgaggactggctaaaacagggctgggacagaagcagttttccatcaaacacactcaccagctgtcatgtcagtttactactgccatggcaacacctaggtgttacctactgtttccgtggtaataacctaatgtcccagttactactcctttcctaaaaatttctgtataaacttccccttaatctgcatgtaattaaaagtgagtataaatatgattgcaaaactgccctgggctgctactctctgcccatagagcacccctgctctgcagaagcagtcacagagctgcgacactgttgcttcaacaaagctgttttcttctagccccagcttgcccttgaattctttcctgggcaaacacaaggacctttatgggctaagccccactgtggggctcacatgtcctgcatcagtcccagctactcaggagccttaggtgggaagatcacttgagcccaggagttcaaggctgcagtgagccgtgattatactactgcactccagcctgggcaacagagcaaggccctgtcagtcagtcactcaacagcattttctcatcaaaggatggccaaatgacatcataatgatgttgaaatcaaggttttcttatggttggaagtgctgtaagacctgagtcatcacagtacataaaggcagcataacccaggtccaaataaatagaccccggggcaggtataggttcatacagcctacaatttagactcagcaagacttcttcatctctcacaatgatgtgcttctatctgatggatctctgttacacatctggatgtgtattggtttatgatttcttcttggatttatgattgcatgaaaattataaggcatttttatggagttttcacacacacatacacacgcgtgcacaaagtttagtaacagtgtactagaacccaccacttaaacggagggatctgaaatttttttatttaaataaggcactacattagacacatggaaaaacatgcgacccacgtcacagatgagtaagctgaggctcagagagatgacatgaaaagtcagttttccagccaagacttcaggctcctgagccagtgctcaatcacaaatcacaaattatgaaatcaaatctattaagttccattcctagctacctgtggatacaaatgttggtttgttttttaaaagagaagaattttgttgttttcctagtagaattatgcactgagaaatcatatcctgattttaattcatagaacgatttcattttgggaagaggaagaaacgttacattagccataaacatatattgtaagagacatccaaatttcagaaatgttaagataggaaaaggaaaaaaatctatcattaaatggaggaagtactacatataaaataggaaagcatgcctgcaaggaaacaaactagattcagtgattcccaaactctgatctcagggccctttcacactctaaaaattgatgacctcaaagagtttttgtttatgggagggtagagctagtgatatttaccattttaggagtgaaaatgagaacaactttaaaatatgtattaattcactttaataataataaaactcatcacatgttaacacaactcaattttatgaaaattgtattttataaaacaaagcacatttagtggaaagagcagcaatgtttaacattttgcttaatagaagacatctggattctcatatctgcttctgcattctcagctgccatatgaaaaagtatataaaggaaaaacagaacttcacaaatatgtagctggaagagggaataatatcttaatagcttttccagaaaattttagattttcttctgtgataccacaccataactcgaccagtggtggtttctcaaaggtcagctacaatgtgaatgtgaagttttctttctttgttacattaaaatctatttgtctcacattttgaattaaacttctacccacgagaaattccataacattagtcatttggaaaatattagttactgagttatgccaatcttccaaatgttgatacatttctttatttcagaaaatcacatgttaatatctctgccaatttaatcagaaatatctttatgtactgggaagcagtcatgctcacagtgggacataagttttccaaaacctaattttacctagaaagtttgaattttatctttagcaacaaatattgcccattttttgccttacagtgacaggcttgtgtcactcatttttaataaactctctgccagacactcaggtctgaataaccagtttttctgtccgtatttcaaatgaaaacgctgttctatgagaaaacctcaccatgtaaatcaagccttcgcataaaagtatttctcaagacaaccactgagaagctgggcgtggtggctcacgaatgtaacactagctactgaaggaggctgaagcagaaggatcacttgagcccaggagttcaaggccaagctgggcaacacagtgagaccttacctcaacaaaaataaaataaaattaaaatttaaaaaggaaccactgagcttccatatgttggagaagtgttttatgccgacatcatcacacaaaatgttaaattgtatattaaagtgtcagattttaagtaattaattttgtttcttcatcaaaaacagtgggtgaaaatggcttttaaaaacactgcgagtgtgtggggtaaagaatacatttggtgccaccgtcttgatttgtgccaagtgatctctacatttttgcccctcaggtcctgggcaccactgatgtagatgtcaactcggtgaacaacacaaaatcgcgtttcataatactctgaaaacagtactgcacttatggccttcctgaaatgatcttagtgatcccttagggcccagagaccacacgctaagaaccactggcctagacctgtgatactggcacatcagtcacctctctgggcctccatccctaatttataaattcagaggctgcattgctgggtttagaagttccctttaataccaaaaaggtgcgagtacacatatgttcatatacccccaaccagtgatcatccaccaaacctcatcctgagagaataataatttatgaaaaatgtactagaaaaaaacataaaagcactgcaaagcagtctcagcagccatgctcagggtaactcccaacaggtcaaagtacgacaagcaacacagagttctagagaatggtgcagtagtagtcacaaatggcatgagatcttttcacgagtttcaccttattttaaggaaagacattcatataaatatgtggccttatcaacaaaatgaatcatgaaacacaactgcctgattcatctaaaagttcacctaaaaggttccccacctctaactgtcctgactaatataacattgcataaagaaggtaattttgctttggcctcggatgaataaaacatgatcttctcacctatgatttgctacgtttctggggcccatggcctatttcagcattattaataatctgatgtaatttgtgttcattacagtaattagaaataataggagcttctcatttaaggtaatttggtcacattatggccactccttatctcaaattttagcaaaactgatgcattttaaaatatgataaaactttctaatcccataatcttctgatttatttaatatatagattttcaaagtatatcctctgaaatattaaaaagaaaattcaaagacaaggatcttcaataattaagctgctgcatgaagcacagagcgactggtgcgatgtcactgggtccagaatgagggtggagactgtttgatgtgtacactgctttgaagaggggataaaacagcaataaaccttcatcacaagatctgaaattctccatggcactaatgcactgtaaatattgatgtctctctctaggtaaggtgccttttaaataagtggaagaaatggtgatctaattatgaattagagcaaataccaaagggcagacatatacatttttaactgttaaatatcccaccctttcttctcatcaacttgcccaatgtctctcttccttcattcttcaagtcgtttttcaactatttaaccacttaaggcaatgaataaaactctgccaagaagacaggcataaatcatcaaggtatttaatcgaatctaaatataatatgcagttacatgtgtgcttttagaacttatgatacaaacagcaaaattactcttcatgcaaaatgaaaactgtctctctcccatcttcagggcaatcatacatttcctaaagagacatctaaccatgggaagaaccaagttattatcacatgctgtggggatacaaacctgtcatcacgattgcaaaaccaaccttcagatatgtgttactccttttcataaaggtatttatccatacttcatttatttcctagaatctttggaagaaatttgtggaaggcagggcaagaaataagctttgaaaagcaacaaatgactcagagagaaggatataaaaatgaatcttatcaccttgttattaaattttttttctatataagcaataaatacaggatactatggttggaagatgcttagtgataaactgaaatattacattttacagataagtgcaatgagcaccacaaacatagtttaagggctaggtcaatcactatactccaagaagacccagctgcattgggagtacttggtaattgactctgtgcaattcagatctgatcacattgctatccagacaaaaataaaacgtatcaaaagtacaagatgcctatatgttgcacttgaaacaacaggtgatttaatggtaagtttaagatacatttctgtggataacaggatgttttcaatggttgcactgaatccaacacacataaggagggaaaataaagtcaaggggaaaaaaacatatgcaattttctttcgagacggagtttcactctcgttgcccaggctggagtgtaatggtgcgatctcggctcactgcaacctccgcctcccaggtttaagtaattatcctgcctcagccttccgagtagctgggattacaggcatgtgccaccacgcccagctaattttgtatatttagtagagacaggttttctccatgttggtcaggctggtctcaaactcccgacctcaggtgatccacccacctgggcctcccaaagtgctgggattacaggcgtgaatatatgcaattttctaatgacatattaatgtttccatccaaaagccaagcatttttctgaggcatattaaatctataccattacaattctcactctgaaactgacaatataaccactctgatcaaaaatcttctaaacactcacctgagtacaagaaaaaatctgaataagattgtatacattttatataaaggctgtatattaatgttatataaatgttaatattgtggttgtgacagaacaggaacttttctcaaaatcttatcattgaaatgaatctctctgtatcatttcttatacctgcatcagattctatgattagctcaaatttaatttttttttttttttttttgagacagagtctcgccctgtcgcccaggctggagtgcagtggcacaatcttggctcactgcaagctccacctcccgggttcacgccattctcctgcctcagcctcccgagtagctgggactacaggcgcctgccaccacgcccggctaattttttgtatttttagtagagacagggtttcactgtgttagccagaatggactctatctcctgacctcatgatccgcccacctcggcctcccaaagtcctgggattactttggggcgcgtgagccacggcacccagcctttaaattttttttaaagcacaaagagttaaacaaaatcccagttgcaaattctcaatgtcaaggcctgccgcaatcgagacttagggtaccttcctaacattatttccgataatattcttcttatcacccaatgtttagcccctacagccactgccggtgccctgtagcctgtccacacagacagctccctgaacatgcaccacagtagacaactgcatggcgcaccagtgctgcaacttccattatcaggaacctttgccctcctctccacccacttcagtgtgtcctgtactctacaagtcctcctcaaatgacagcacctcctccaacccatcagatctagtatttgtgtcctggcaccaagtgttttgcggactcagagaggggtctttgaggacagtttagcagaaagactgtttctaatatatggcaggattaaggaatgacaacaaagggtatagtgccctctgctcacatgaggcaaggggagctgtgacattccccagagggccacagctgcacaaaagccacagccaggaaggctgaataagcctgccttttccatctttccacttctgtcaatgccctgctgctgcagtccttgcaggcacaaggcagacggcatagagcctggacagtcagtgtgaggggctggcctcttggcatatggagcagagcacagataggtgtggaggatcaaaggaaacaatccagctcagacgtactagtaaaattcctctgcctctttctcctactgcaccttgcttctccttttttgtctttttagagacaaggtcttgctctgtcacccaggctggagtgcagtgcaagatcacagctcactgcagcctggaactcctgggcttagtgctcctccagcctcagctgcaccagtaactgagactataggtggacaccactactcccggttaattaattttttattttttgtaaaaacaggatttcacagtgtggcccaggctggtcacaaactcctggcctcaaagtgaaactcccatctcagcctcctaaagccttgagattaccagcatgaaccacctcgcccaacctgtttctacttttaacagcatcggccagttattcaactagaggacaagtattgactctattcatttttacaactcatccactctagacacacaccccaacaaagtaggaacaaaatgttttaaagttggctaagatatatcagtcaggaacaaaaatacttcccaattcgttttttaaatagatgtattccaatattttatttttattttaaacttttattttagctacaggggtacatctgcaggtttctttttctttttttttttttttttttcttttttgagacggagtcttgctctgtcaccagcctggagtgcagtggcgcgatatcggctcactgcaacctccgcttctcaggttcaagctcttctcctgcctcatcctcccaagtagctgggattacaggtgcctgccaccacatctgcataatttttgtaattttaatagagatggggtttcaccatgttgaccaggctggtctcaaactcctgacctcaggtgatccacccgcctcagcctcccaaagtgctggggttacaggtgtgagccaccacgcccagcccctgcaggtttctaatacaggtaagttttgtgtcacaggtttggtgtacagaatatttcaccaaccaagtaataagcatagtatccaacagttgttttatttatttatttatttatttatttttatcatcaccctcctccctttccctctccctctctccaccctcatgtaggccccagtgtgtgttcagggactcctttcctttcatccccagggtagaacagagtggttaaggggcataagaaatggacatcagaggtgaaaagcctttgacttctctcttcctgcctctcaggcgagagtgaaggacctggcctgaggcaatgatgtaaatgaccagctacttatcaaaacaggcattggctactgaatcctgtgcataaaaacgtggtatccccaggtcctttgctaagccagtacagttcaggggaaaagttagttgagcccctgccagacacatcagggagtgatctggccacccagagagcaaatggaaagcagcagttcacaacaatgacttttcctcttttatatatattttggtgtccttattttgctatgggagagctaccatccagctacttcaaccaatacatatttgattagcatctaactagacatcattatcctagtgattttcaaaactaataaatatggggccaagatgttgagagtcatttactgtagaaaagtagaaaaaaaaaatcactctaaagtgaatcccattctgaccattcattcatttatttgagacagggtcttgctctgtctcccaaatgggagtagagtggtacaatcatagctcactgcagccttaactcctggcctcaagcaatccacccgccacagcctcctatgtagctgggaccacaggtgccccccaccatgctcagctacaggcacacaccactgtgccctgctaatttttatcttttttttttttttttttttgaagcagcatcttactctgcctcccagagtggactgcagtggcaccatcattgctcactgcatccttgagctcctgagctcagggaatcctcctgcctcagcctcccatgtagctggacccacaggtgccccccaccatgcccagctaatttttttatgttctgtagagacagggtctcacttcgttgtctaagctggtcttgaactcctggcctcaagttatcctcccgcctcagcctaccaaagtgctggtacaggcatgagtcatcatgcccgacctggctaatgtttctattttttaaattaatgggtctcgctatattaccaaggctggtctcaaactcctggcctcaagcagtcctgctgtctcggtctcccaaagcgctgggattacaggtgtgagcccctgccccaggcctctgaccattcaaaaaggaacaaatcctctaacagattgctactccccagcgactggctcaggacaggtaaaaggcaaatgttagtaaatgtccaacagggacagttagaagagtactaaataccatgagaagcccagatgaaaataactaaaggtatttacatacctggtaccagagactttcactgagagaatattatggaattatttttctagattctttttgtactttcagaaacataccttaatgagcaatgaggagattgaagctgagaccaggggaatataaggtggaaagaaactgagagaagaaaaaagaagcaagttagagggaggatagaggggcatgtgaacaggtaagagtgagctattttccttaaaattaaaaaaaaaaaatgcaaggtgcagtggctcacgcctgtaatcccagcactttgggaggccaaggcgggcagatcacctgaggtcgggagttcaagaccatcctgaccaacatggagaaaccctgtctctactaaaaatacaaaaaaaaaaaattagccaggtgtggtggtgcatgcctgtaatcccagctactcaggaggttgaggcaggagaatagcttgaatctgggaggcagaggtttcggtgagccaagatcgcaccactgcaccccagcctgggcaagaagagcgaaactccatctcagaaaacaaacaaacaaaaatgtgtttctcttgcagatgataaacaaaaatgaacaaaacatgagaaagaaaaaagacactttgggaggctgaggcaggtggatcacttgagcccaggagtttgagacctgcctaggcaacatagtgagacctcgtctctacaaaaaatacaaacattagctaggcacagtggcacgcatctgtggtcccagctactctggaagatgaggcaggataattgcttgagcctgggaggtcatggctgcagtgagcccatttcatgccactgcactcaagcctggacgacagagtgagactctgtcaccaaaaaaaaaaaaaaaaagagagagaaaaaaaaacagaaaaaaggggggaagcttatgctattgttatttataatattgcttttcctcatatatgtgctgagtaggagatgtgctacctttctatttccatatggccaacagccccagatagaatgtaagacccacaaggggatagaacgtatctttcttcctcactgtctcaccctcagtgcccaaaacagtgcccggaaaactaaatacagttgattctagttttgcacaatagttatgttatataaagtaactgtaaacactgaattagcaaatactcaaccactgctcctaggagaaatacaaggttaggtggagcctctgaccacaaccctgttgttcaccattcaatacagagccttgccttaggtgtgatctgtataaagacatcttaattaatatatattgctgattaaactcacggctaacaggactataactcatacctgaacaaagcttacctaataatatattttctccggaaggtatatcacagactaactgtgcttaggaatgctagacatcatgttggtattatgcttgggcgccattttaacagcaaaatcaccagcaaaaagcacgaaaaacatggcaccaaatagcccatgaaaaggacacttttttaaaatatgaaaaccagagcaagaaggcagtttcccattcttcagcctcaactggaaacatattagtcaagtgactcaaactgtttgccatccaacacatgttcatgaatgagcacaaaggtgccccgagtattaatttaggagctacaaataaattttagcaaacagctaaaatcacaaatacggacttcacaaagcatgagaattttaggtaaatatttgctaaatgaacgactctcataaatctttaaaggaactataccactccctctgtcagattccattccagatactgctcttgtgcttattttcttcataggcaatcttttgacaggagtgtgctgtttcattgctcctctcgagtactcaactaacatagtttttgttgttgttgtttgttgttgttgttgttttgccaagagtgccataaatgtctttccctttatcaacccatatttttgagccccatgtccctaggatctcataatatacaacatagacctggtctctgccctcgtgaagttttcagtgccctggagaatgtagacatgatccagcacttcagcgtgatcctgctgcttcataagtacacagcactacaggaacatctaagagaggcactgtctttaagagctttagcaaagacttcaagtgaaaaataactgctaaattttacctatgaaccttttgcattctcctgcaggccacctcttgtggaaagcctctgaccactcctccacaagctcctttcgtggctgccagatcgtgtcattgtgtttgccatgctgccctcctaggttttaggaccttcctcctcattggcaacccactcctagacaacctcacctttcactgtcatatccacagaggccaggcccttaaaagtatccgagacaagtctcaatcaatttagaagtttaggccgggcacagtggcatacatctgtaatcccaacactttgggaggccaaggcaggcagatcaccttaggtcaggagttcgagaccagtgtgaccaacatggtgcaaccccatctctactagaaatacaaaaattagccgggcgtggtggtgcccacctgtaacgccagctactcgggaggctgaggcacaagaatcccttgaacctgggaggcagaggcggcagtgagccaagatcatgccactgcactccagcctgggagacagagcaagactctgtctcaaaaaaaaaaaaaagttcatttttgccaaggttaaagatatgcccccaacacagcctcaggagatcctgagaacaattgcccaaggtgatttgttacagcttgattttatacattttaggggacagaagttataagcagacatcaatcaatacatgtaaggtgtacactggtttagtttggaaaggtaggacaatgaagcaagggattccgggtcatagattcagagctttttgactgtcaattggttgaaagagttaagttattatctaaagatctggaataaacagaaaggagtatctgggttaatataaggggttgtggagcccaaggttcttactatgcagatgaaacctccaggtagcaggcttcagggagaatagatggtaaatgatttttaatcagacttaaaaaggtgtcagactccttgcgagagagatttgtggggccatttcaaaatacatcacagaaatatattttggggtaaaatactttgatttctttaaggtccagctacctgtcattttgttatatattttattgctacaaagagactataatgtggctgtttaaacgttttgggtttttttttttttttttttttttgagacagggttttactttgtcacccaggctggagagcagtgtcacgatcgtagatcactgcatccttgaactcccaggctcacacgatcctcctgcctcagcttaccaagcagctgggactacaggtgcgtgccacgatgagtggctaattttcttatttttgtagatacagtgtcatgttgcccaggctggtctcaaaatcctgggctcaagtgatcctcctgccatgacctcccaaagtgttgggattagaggcacgagccagcctgttttaatgttaatgctggtcagtaatacctgaattccaaagggaggagggtataaaaaggtacatccaatccccctttcccatcatggcccgaactagttttcaggtttacattggtatgttcttggccaagaatgggtccattcagttggttaggggtcttaaaattttattttttgtttacagtctgttttggttttgtttcagggcaatggtggtggtgcctggccagatgaatggggcagaaggaagacaatacatgagcagagaaaactgcatgtgcaaaagccagacactgaaattcaagagaattaaagaaactacaagaaattcagtatggctgtaccagatgtgattggaaacaatgtgattagaaggtgacaaagcaaacaaggtagctttggatgaggcaactcagtgtcttctaagtcagagactgtcaaaggttgatgtgcacagaaaccacctaggaatcttgttaaagagcttcagtaggtctggaatgggtaggatctgaaattctgcatttcattgtcctggtgacatcagtgctgctggtctgagtgaccattacccttttgtgactctgagcagcagggctatgtcatactatatacatataattgctatatataaaataaatatattatatatgtacacatatataattcagctgtgatttttaaaaatgtgaacttcatactggcagtcacggatcctcatcatttctcagcttgatttattctctctctccaggcctggccgtctccaagtcatcctctacaaagcactcatgataccttttgtaaaccacaaatcagacgtcataactcagaattttcggtctgcttggggcacaagaccatttttgtatcctctgtgagctgaacaatgtctctgcacccttacactcaactggaacactctgcaactacagaaggccaaagaggcttccaagttctctcttctgggcctcttctcactcactctcttttctaaggtcggccgggcaggcattgccatctctgagaagtttaaaaggtttctacagactaagtgaaatcatgcttgacttcacttagatctggtactttctcatctgtctgcctcattaaattttgtgattctacccccagtttttaatccagcaaaggacaccgagaaaatgtttgttaaagtgttactgtataaataaattaagaaaatgaatgacttccatcttgagatacaggacttccatctatctctgtccttttcacattgattgtctcaagtattgaaagggcaatctctgtagcaaagaaacaattacagatgttggaaggccccagagaacaaaaaaaagggttttctaccaggaaaaggacaaagaattgccgcttcaaatattggtgataaactccctggctagaaatcccatccaggttttacttttttttttttttaactattaattttgcactatggtccttcatgcagtgctgactcccttatgagaatatctgagtgggagtcaatctaaattaattcttcacatataattttataggtatatctgcaccaaattcctcatatcactttcattttaccaatttagttcaacaatcatgtaattaaattttaaaattataacttcatctaacaagtaatttgtctttcaaaaattgacattgactattgattgcattgcagatattctctaaatgctcaatgccctctcctttgacatttgtcttctattattttattaaggattcaaatacagcagtaactgtcaagcattattcccccatttctttattattataacctttactccacaatactatataaaagcgtaatctttttctcttacctggggactagcaatttgccaatttcatttgccagttttctgtcacctcaggatgtgcgtttgaagctcctgcactttacaagatttcataattatcccagtgtatgttgaccatcaacaattacttcacagcagcaagcctctctacaactatgaggtgttaaacttccactgtaatctccatacttcatttttatcagagctgggcttttcatcttgcacatgaattttttatttttattttatttatttatttttatttatttattttttgagacagagtctcgctctgtcacccaggctggagtgcagtgatgcaatctgggctcactgcagcctcaacctcccaggcagaagggatcctcccacccctgcctcctgagcagctgggaccacaggcactgggatgcaaatgaatcttcatggtactaaaacccttttttttttgcccccgacatctaaatctcttttactgggggaagtgggcctctcacggacacgcagagtgccctctgtgcacggcttgctcgtgagcactgcttcctgtgtcctggggcttcctaaccatgggatgtgcagggcctcaaggccgtcgtccgcctggaagcccagcaccgctgtggccggggctgtggccatgcactttggctggtgaagctacactctcccagcgtcttgccaacatccaagagctggtcatccctgtacagctgctgaggatgccctcgacgatgcacttcaactcaaacaccatgctagacaccctggcatctgtgaagatggtgatgcagtggcacttgatcatgaggaacacgctatctctgtggccacctctcccttcagcacacatgcacggccatgttctgccgggttcccagcagccagcgcccacagcccagcatgccatgcgcatggccccgccgcttgcccgccccactaaaagctttctaaggaggtttacaaagtctttcttccaaagacaaatatctacagctgggcgcaatggttcaagcctgtaatctcagaactttgggaggctgaagtgggaagatcatgtgatgtcaggagttctagaccagcctggccaagatggtgaaaccctgtctctactaaaaatacaaaaattagttgggcgtggtggtgcatgcctgtagtctcagctactagggaggctgaggcaggaggcagaagaatcgtttgaactggaaggccaataatccctccaggatgttccattctggtgaggacaggacaaagcatacacatgtgaacacagactacgccacgaagagatcagtgctaggaacaaaaatgaagtaaaggatcggatgctgccggaagttgaaaagctttattttctacagggggagtatgacggaagcactttaaaaacattcaaatggctcattatccacttctctgtcttaactgttccagtttcaaattaattccttaccacacaaccctgtacacactggcgattaataaagccatttggcaccaactggttgctccaaggcagcaataagacttcatggctctgaaacatatggctgcgtgtctgtttatattaccttcaaagtgcagagatctttcatagctaatctaaaccattcattctcctccttaaggaaagagtaatgtaaaagtaaacatgccttgatcatttataatgagccaattaagtctgtaatcactaacatttgttgagcattcactatgggttatgtatatgctaagaaccttaatgtcatgactgatcaaatcctcagaataaggctataaaataggttctattattattcccattttataggtattcctattttacaggtatgaagacttggtgttacagagataagatatcctggcaaaagttaatctaacaataattagtggagataaaaatccaagcctcagtcgtcaagccacagaaaacatgctcctatccagtatgcatgaaatccaggaacaccaagaactgaaagaaagactctctggtttatttgcacctttctcacctacatctaccatcactgccatcacacggtaggagtgcagtaaatgcacattagctgaactcaaccacactgcaagtcagagctggaagaaaagacactattcattagacaatgactcatctcatgcttggatcttgtaatcattcttcacagggaaaaagaaagaccatgaaaaacattttaagaatgaaataagttccctttagctaagacgagcaaacagaaaattcatcacaatttattttattattaggggatttgtgagaagaaatggggagtggtacattgaaggaagggcacattacagagagagagagagagagacagagggagagggtgtgtgtacacaaaacaaaatgctcgtgcttcatatctatgtcagaacatttactgggattaacagaaatgcgttgggtgcccttaatctatacattcacaaagtatgtcactaacatctttgcctcccgaaagtgctgggattacaggcatgagccaccacgcccagcctgtcaatatagtcttgtgtattttcaccaaaagagtcttcccagtcaaatgtttagtcaatttaagataatatacttagcactcagtacagactaactctttcttacatatactgttcctatactaacctcaacaaaaagtggaaaatccagggcagtacttaagacctccccatccaaacgtcacacttgtttgtatactctttgagttatatatgtggttctaacacttcaccagtcattaaaatgacgtgggaatactctgtaaaatgctggttccaggatccccatcagaaatactgaaaatttggtctaggaagaagcccaggaattactttcacaagctcttcaggtcattgtaacatgcagccaagacagctctagaagagaattattgctctagaagagacagcattgcatatcagccctaagggacctcatgaaaaatacagattctgaatgaataggtctggatggggcctgagactctgcatttccatcaagtccccagacgatggagtcactagccacaccggctatttagattcagctcctcagttacccttgcctcatttcaagggctctacagcttcatggagtcagtggtcacaggatcatccaaaaacacatctctctgaaatttttttagtattaagcaatgtaattaattttttagtattaagcaaggacactgaatttagctaaagtataattaaataaccattaactatatactctcagttctatcaactcagaaaagatctgagggatttccactacttctttctaactttaatttgaaaaagttatatagaaataattgtttttctacttatcaaacatagggcaaaataatctgcattttctaacacctctttgaattttttcatgaaatatgtttatgtttgtccctcttgggaatgataacacatgcacatgactccccaaggaagtaaacaaatttacagaagcatttttttattaaagtgctatatttagaactagctcactgtgacaattcaaatcctattgcaaatttgtatacaaaacaggaagtttcaataataatcaaggaaaacaataattctctatttagcattttaagaaaaccaaacaaatgcttggctgctttttaattgaggagataaagcactttaatattgataaaatgtttctgttatttaagtagcacttttacaactctaaagccaagaactttatccataactttgccagtctgtcagacaaccaggcaaacagaattcaacccagtcgtggtttcctaggcaacaagcacagatagaaccactggggggaaaaaaaatgaaaacaagaaaaagcatcgcagcatttccagtaggcttaagaaatgcattttaattgtcaaaatgtcacagacaacaatattgaaaatcatttccttggaaatgattcaaagcagaatgccattttcattacagcaaacgaggtgtggaaaaagagaaaaattagattcccttcctttgctctgaattaagtagggatggtgatcaatcttatttgattttacaaaatgtatctacattagtacggatttctaatatgcctcgttagttttctctgcaaacattaccatacattgaatcaacataaaaagaagagtcatccaggatgacgggctagcacaggacgaagcatgtggctgaagatcatctgctgcaaagacaggctcgcacctgctcaggtcttaattcacagggtaaaccacacacttcaaaacaccgattcaaacagaacaaggctgtccacattcacgcatggctctagtttcctcatctataacaaaaagggcttaccttctatcttaaaaacttctgtccctaacagcttttgatttttggaaataaaatatagaagggctgttctgtctagaaagattgcttacaaaataaatactatattctaaagcattttaaaactttttctttataggacctaaatattgacagttaacctttagaaaataatatttgaaatgtcctaccacatggctattaaaatgtctaaattttacaccagcttttgtaaccctgatggcatttactcttatatcctgatcagaaacatttacttggattaacagaaatgtgttgggtacccttaatctacactttcacacgatatgtcactataatcttgtgaaatcatctgtattttcttccaaagaatcttttcagtcaaacacttagtcaatttagaaacttaggtcgaatcgattaagtaattcagtcaaaactaccaatatagtagctgcaggcaaatatcgctaaagcgtttttctgataattcacctctcaatgattggaaaatgagggaatgaatagcaaaatgggaattccaagaacgaaagtgtttaccattttttctgtctaccttgtatatccacaaagcaagattaatgtattataattcatttttctgagccaaccacctgccactgaacttcattagatcaatgttaatgccttagtcaatcagttgcactactggagtggtgttgagtatctggctgcatttgtgcatatttccctctgtgatacatacttctcctcatataaaagctagtacaatgcaagacatgcaagttataaaagaataagttgataatgcaaagcaaagtaaatgcccaaaaatggaagcacatgcatacattaccttattccaatgtcttcaatcaattcaaaaaaatgtgacctgtctgcgtgtggcacaggggatctctactcctggctcctaccattgcatgagagagaattattaaattttcaggaatttctgagagttgatggttaaataaaattattaaaaattataatacaggccaggcatggtggctcatgcctgtaatctcagcattttgggaggccacggcaggcggatcacctgaggtcaggagttccagaccagcctggctaacatggtaaaaccccatctctattaaaaatacaaaaattagctggctgtggtgacaggcacctgtaattccagctactcgggaggctgaagcagtagaatcacttgaacctgggaggcggagactgcagtgatccaagatagtgccattgcactctaacctgggcgacaaaagcgaaactctgtctcaaaaaaaaaagaaaaaaaagaaaagaaaattatagtacataaacttccaactaaactatattaaaacaaagataatactcaaaaatcttcacgttcgaattattttactatattttattagtatctacacacatgatgcaccttctccatctattatcatggaaataccatattacagtttgctaccatgcatctcatcccaactcaacattcagtgacatcaatttggtagcctgaatctggccataatactcatatttacaccatggaaatgggaaaatgtgacaaagccaggtttctgcggttttcagagagccggctattaaacatttcccaacacagcagtggatctagagaacccacacaaattccctactctcccgtagtcaccaaaaatacacagcactacaggattatgtagcaactctatggaatccggaaacacctactgaagaaactgttacttgaccagatgcctatggcataagtaaggctagacaggagagcaccaaagagaagttttaccagacaaagggaaaagagagtgcctagagttaagcaggaagaagactcatccaagaaattcagaggcccagcgtgctagtcatgaggtagaagagacaaggctgcaaagacacaaaacaattcttatacacttgaacaaaacataccagtattcttaaccgtactgggaagctgctgaaggtttttaagcatggaggtagaaggaagagagatgtgaattactaaacgatcacttgactaaactggagaatggatcaaaagactgcccaagaaaagatgcagaaaaagtgaccagaaagcaggtccagtgcctccaaactttcttgataacatagccctgttaggaaaatctttctgagcatgcagctgtataggacttttatttaatgatcatttaaatgctcaattccactaatacaaacattattaaacatatacaaggaataggaaattttacaatgtgagataataaaatacagatatgttaagtcctgatatttttttaataattgttgttcccctaatccccatgttgatcaaaggtccccatttgttttccatgcctcaatggttctgcatcacacttcacagatcactgatgaagccagctttgggagatgaaatgtaggatgcactggtaacaggattgataaggtctgcaaagctggagccaattccactgtcagggaagaccaagctcatgctcagacattccacactaggaaaaacctcttcaaaacttagcaccatgactgtgaccaatttccagccccccaacccaatttgcctactgaagacaacacaatggttgagcccaatttcctggcactcaatttcgcagggggcaaaagaaaatgttaaactcattgagataccattgcttcctaactatctgtacccataaacaaaaaaagcaaaaaaaaaacaaacaaaaacccacaactcaacacaagcacagtggtcactgtgttctggcatcctactgcagacaagcagatctgcccatcattgcttctgacacctgccaagtaagacctcatccaacacacagtcacagtgcccacagaaacgtcaggctacagttctgtaagaagttcatcagagtccaaataaaggaaaatctgaattggcaaggagaacccacatttattggtacccttggaaagattaatcactcggataatcaagggtagactcactacattttcagacatagctgtgaaaactgaatttagagccagcgtgctcctgatgttaacttactttaagcatttgcaaaataaaagcaataattccaaatagtggtctctgaataccctttcccattaataggggcaaggctactttgagaaatgactgattccaggtatggggcagaaaatatattagaagagcatgaaacacactgtcacagcagaaagtgaggatgctgctaccaacagctctcaggagtcagcttagaggggtctggttattcaaatgtggggcaactgaaacatcagtaagaagaataatgcaaccggctgcagtaataactatgttgatgtttgtgagttcttaatgatatcttttaaaaagaaaaaaaaaaaaaacagtaaacatgaaccgtgaggatgtggccccagaaaaccaacttattttttctgaaaccaataaaggaagaggctagccatggtggctcatgcctgtaataccagcactttgggaagctaaggtgggtggatcacttgagctcaggagtttgagaccagcctgggcaatatggcaaaaccctgtctctgcaaaaatacaaatattagctgggcatggtggtgtgcgcctgtagtcccagctacttgggaggttaagatgggaggatgcttgagcccaggaggtcttggcagcgagccaagattgcatcactgcactgggtgtccagcctaggtgacagagtaaaaccatgtctcaaaagggaagaagaagaaaaaaaaaaaagaaacaaaaacaaaactgataaagaaacagatgaaattaagcatttggcctacactttccatatgaactgtatacctcagagtaactggcaagaatagctgagaaggaaaagtttctgtttatagaaatattcccctactaaataaaggaattacagtaataacaggtagacagataaaagatccaggtaataattaccaggggctgctcacaaaatgatgaacaaccacactgtccccatctgctgatggaaccatacaacaatgcctggagataatattattacaaattgaaatcggagttatattaagactctacatccacctatcagtttataagaaacaccgaggttatagaacatggtagataccacagggatggattcagcgaagtcaagacaggaggaagctgcaggagaaagcaagcccaatttcaacgaagaaactgaaacacatgcacaggggtcaggcaggaggaacaacctatagactaaaagaatccgaagagatatatcaatcaaatgtaaggtgtggatttcgtgtggattctaaaccagccaaatataaagcaacatttacaaaacattcagatattttaataacactattacatatagcttaagtatttttgttattaaacagtactatttttaacgtttaaaaatagtatactatttttaaaatgtatactaaaatgttttcagaagaagtgacatgaggtctgaaatatgtttcaaaataatcctgtttggatgagttcgtaggagtatagatgcagcaagactagccataaattaataattgttagagctgatagttgagctgtatgtttaaaattttctgtaataaaaaatgaaataatgtgatccagcaatgcagaagactagtgaaaaatatccaatgtagtaacactaaataccactggtcttcctatctgttggttccacattcatggattcaaactgaatccacggactgaatctcaacagattgaaaatacttgaaaaagaaaataaaaataacaaataatgcaaaaattaaaaataatgcaaataaaaacaatatagtataacaactatttatatagcgtttacattgtgttaggccttataagtaatctagagattatttaaagtgtacaagaggatgtgtgcaggttatatgcaaactattacacaattttaaataagaaactgagcatcttcagattttggtatctgcaggagttcctggaaccaacccccaagcgatactgaaggatgacagtgagagcttttccccacaattaaggttatatttttttaaagaaaagctgcctgaagtcacacgttcaccataataatttctacaatattttctgcactacagtgtaataaatctctttggaacaggttgtgctgactttatacaacattcattgagaagaggtatggttttactgaaaagaattgctaaatcaagcctcctaaaatgctgttcctcacaagttaaatgagctaggaagcaacatgaaatttaacaagatgatcagcgggtcaagatgtggcctcaactcaatttacttagatgtgctttgactatgaaaagaagtaacaaatactattgcagtgtgattttttccatctttaaaaaagatgaaacacaattaattataataaagttacacatgtaaaacagttgcattttacccacacatacttagatcttggaaaataattcaaggggcaccgaagtaatatacaaaaaccgtgacaaagaaatgtaaagaagtgctttcccccctctcctacctcctcaaagaacttcttatattattttgatttccataagatatattactataagatgttcaaaaagattatatttaccaataagattgtaggtaagtaggcagaaaaaaaacaaaaatttcaaatacgagtagcatagaattaagcttgaaacccataggaactgacagcaaattataagaagcagtcagatgtagaaagagacacttcagtatttctcagcttcatttgattaataattcttttaaaagtctgagggagatgcataagtgtggtatgtaggtattcatttcaaagacagtgtttaggaaaataaatctagaaaataatccacggaatataacatttcatttatttaagacatattagtcactgtcccatgagttttatacacatcattctcatttcatacatgccatttatgtcacgctttattcctgctatgaatacttgaagtaaaaaggccactatcccctgggcacagtgttgctcacacctgtaatttcagcactttgggaggccaaggcaggaggattgcatgaggccaggagttcgacaccagcctggccaacacggcaaaaccctgtctctactaaaaatacaaaaattagccaagtgtggtggtgcacacctgtaatcccagctacctgagaagctgagacacaataatctcttgaacccaggaggcggaggttacagtaagctaagattgcaccactgcactccagcctgagcaaaagagcaagactctgcctcaaaaagaaataaaaaataaacaaaaattaaaaagcctacattaatactcaatttccagccaataaataaggataatcacttacgtgtgaacatagaaaaataaaggtaatgaatcactgcaacacatacacacactcctaccttttttagacacttagaatagcactgaagtaatagccctgactcttgcataagaaagtataacacacatatcaccattttcattaccaatagatggtgaaacatcatttactgtagatgagtccagaggaagacatacagcagccaagttcctgagaataaaagtatgcccccaatggttactcaatttgtttagctcaagatttttttctctaagtacatgttcttttttttttaagttgataaggaataatataactacaaaattatagccaaatcatcctcttaagcaataaagctttgttcttagattttaacaaaatgcagcagtctagaatactttgacaataaaaagagtatgtgaagatggatgataaattaaaaaccaaatagttattgtttcagatgtgctttcagtagctatgttttctaatcaagggtatctccattttctacgatgatagactattgctctggacactcagcaagcatataccaggtgaggatatagacacaaaaagttatttgcgaggtttccatataaaattacaaccttggagaatgtatacaaattgaaacagattttttaaattgcatccagcggaaaatagtgtgaaatatttcctcagtgtaaaaaaaaaaaaatcccattaaaggaatctgctaagatatgaagtacacatttaaacatggatctgttgaaattttatatttataacatatgaatagtcttttatcatgctgcattatctagaacctgaaatgaattaagcatactctatttctctaagccaactctgcccaagaccatgcggcccttccttttgatgtcactgctagtttgacagggctgagaagaaaggagagtccagccatctctcagtgtctgtgggagattggtcccagatgcctgagaatgctccagtcctggatatgacatagcatagtatttgcatataacctacacacaccatccaggacacattaaatcatctctacgttatttataatacctaatacaatgtaactgctatgtaaatagttgttatactgtatcatttagggaacatccacaagaaaaaaagtctgtacatgttcagtacagatgcaatttttttcaaacattttcaatccatgttggctgaagccatggatgtagaacacacaggcacagagggctgactacatacttgctgaatgcaaagcatcaaacccgtgctacacacacacagggatgatgaagatgtgattctgactttataaaaccttatgtgctacagaggtctggaagaagctacaaaataaagcagaatgtaggacacacataaaactagaaaagggtgctatgcttaagaaaattttaattatctaaaagattagtaaatgcccaagaatgcactttttcaaaatcgaaagaagaaagtaagttgtaaaacaaaaatggcctttaggtcaatgtgctcatgaagactcattagaaccaatcttccaccatttttaaagtttctgtccaaaacagaattattaaaattgtctaaaataggccaggcacggtggctcacacctgtaatcccagcactttgggaggtcaaggcaggcagatcacctggggtcaggagtttgagaccagcctggccaacatggtgaaacctcatctctacaaaaatacaaaaattagctgggtgtggtggctcatgcctgtaatcctagcttactcaggaggctgaggtgggagaacagcttgaacccagggcatggaggctgcagtgagccaagatcacaccactgcactccagtctgttatgttccaataacaaaagttacataaaataacataaattataataacataaaatgaatacagtaacgtaacttgtgtaacaataatttaatgcctaaaagtaaaataagtcatacagaaggaaagaggagagcttgaacaagagagagtaccagtgaaagaatgaaacttcctaacatgcacaatattcacaacctgtacataatttttctcatcaaaatttcccatctacagcactaaaaaattactatattacttttaattgtgcaaaagagttaaaaataactaatttgttaccacagatttttgttttttatcaagcaaccacaattatataatggctagagttttatttgtacaaatattgccccatatggctcacctaaataaaaaatggtctcaaagaaatactcactgatatggcttggatacttgccccctgcccaaatttcatgttgaactgtaatccccaatgctggaggtggggcctggtgggaggtgtctgaatcctggggacgattccttcatggtttggtgctgtcttcatgacaatgagttctcaggatatctgatcatttaaaagtgtgtgtgtggcacccccctctgcccgacttgctcctgctttcgtcatgtgacgtgcctcctcccccttcaactttcaccatgattataagcttccagaggcttccctagatgccaagcagatgccaatggcatgcttcctagaaagcctgcagaacagtgagccaatgaaagttaccccagtcccaggtatttctttatagcaatgtaagaatgggtgaatacactcactagatcattactgttcattactttccttcccaaaatactgaaatcaaaatgatcagcccattaatatcactaggtcagatgctcatttcatattatcatggaagacgatgtatttgtaaagtgcgttattttcacactaccgtaaatatttaaatgcatgtaaaatgtggtaggcaaaataatgccctcccaccctcctccccgccaaaaaaaaaaagatgtctacatcttaatccctagaacctgccatgttaccttacatcatacatgtgattaaggtaaagaccttggcatcaggacattaccctagtggtatggaatgaatgttgtgtctaccaaaactcaagagtggaaatcctaatccccaaggtgatggtataggatgtggggccttgtgggaagctgtgtcctcatgacttggattagtgcccttattaaaatgacccaatagagcttgtttgctcctcccaccatgtaaagacatattgagaagtaaagatctatgagaaggcaagccttcactagacaccaaaactgctggcaccttgatcttgcactcgcagcctgtaggacatgagaaatgaggtttggttgtttatcagccacccagtctaaggtattctgttgaagcagcctgaatggacttagacagtgggctcatttggatgatcctgagtctcactcaattcaagactatgtagtcacatgagtcttaaacgtggaagagaaggtcagaacggaagagtcagagagagatgtaaccatagaagaagggtccacaaggtacaaggttgataatgctagagatggaggaagggccatacacgaaggaaggcaagtggactccagaatctggagaaggcaagaaaacagattctcacctagagcctcccgcaggaaggcagcactgccaaccctggatttcagcccagtgagatccacaccagactctgacatgcaggactgtaataaactcttaagccctaacatgatgatgatttgttatagcaagaatagactagtactaattgtgtgtgtagcgatatatagacacacacacacagacactcagaactacatataccctgctttccaaaattggaaaaaataaactatacattagacttggctaggtgtggtggtgactacctatagtcccagctactggggaggctcagagagaggattacttgagtatgggcaacatagcaggatcccatctcaaaaaaaacaaaaacaaaaaacaacaactttgattaaactaatttcccacttttgaagaaaagagaaggacagatcttagacaagggggagaagtgaggaaggcagagctggtgacttcttttctggcagaagcacagacacaggcccatgcatatctctgcccagctggctttcctccctctcctcataagggatccaactgaaccatggatcacagacccatactcagaattaaatgcagttttatgcctcagtgtccttgtttctgcctcccattcccaactcccttattctggttattaaaaaaaattggctattatcaaatattagtagatactcatgtactacttagacaaactgatcaccagctggttttccttgttctaagccacaaatcattaggctataacatctctgccaagcaatacaatattcttttccaattcattaacacaaattctgtatttaaaataaatacttctcaagctgttttaaataacaaattaacgaatgagtcggccatggctcaaaatgacattttaattaaatgtgatgataggttgagtaccctagcagttcactaaaatgccctttgcttacactttttccatattatggttgggcagaggcatccctaactgatctaactgtattttctcatcttaaacatgggatctatctttaaaagataatttattcttaaattacatgctattcctataatccttccatatataacctcactaaatatcagctctgtgtgtgcctacgtatatatgtatttgtatatacagacattacatactttttaaaaaaattactaccaaagtactactaaaaagacaagaaaaagaggctttgtgtgatatggtagaaacacaccgcaggatagacaacaggctgctgtgatggctattacatattcatcctttcctctgtgaggaggagtgggaaagtgacttatagcggctgtttaatccctagggtagaaaatttaaggtgcagaaaactttccacaagttttagagagaacataggtagaaaggcattctatgctgggaatacacagtgtgccagtacacaagaataaacaggttgatggtttggatttatgagaacaagaaaggagaaatagtagatgatgtcataatgctccttttatagagttatgaaaatcattcatttcatatctggttaactgctttcaaatgccagtgagaaaagtagttaaagcagggatcagttctgagacatgaagattttataaaaacgagctttactctgggaaagtgctatcatcaacccattcttgagcaaaaccatgctcactgcacttccacattcacaagccatgcagtatacacactggagcccccagatttttttttttaagagatggggtctcactctgccacctaggctacaatgcagtggtatgatcacagctcactgcagcccgaactccttggttcaaacgagccacttgccttggcctcctgagtagctgtgagccaccaggtacagctatttgtattttttactctttttgtagagactggatcttactatggtgcccatgctggtcttgaactcctggcctcaagtggtcctcccacgtctgcctcccacagtgctgagattacaggctgagccaatgtgcttgtccccaagattaaaaaaaaaaaaaaaagaaaagtatttgttgatatgtaggcaataaattgacaaataatagtttgtaaattactaatttaccaatcaatataaataaattgagtaaacacaaaataacaccatgaattaataaactgatttagacttctttttttcctttaaaatgtagcccagagagagactaccagctgtccattccatggaaaagttagaggtgagaatctcagaggcacacttatcagcaccttgctggcttgtgggcagctttctcttagtcactgaaaaagaaaggagtcactgattgggagtgactcagaaattctgagatatgaggcacctctccagctgggtagaggagccaggcaggagcaaacagaactgaggacacaaagccactgctgacactaaaagcaacgaacaaataaataagcaaacgtattatcaagaagtaaaggagagatctatatcaagtgcagcgagaagaggggaaagaattgtatctgccaggctttcatgctgacaaaataatccacaatatgggtctctgtgtgacatgcaccaacagaaaaacgaacccaagtacctggttggattgaaagataaaaacaaaaaaaaagaactcttgtttattgaccagtgtacaatctaatcttggcaaatacaacaaacactttcaggcaattattttctccatgtaacacacgtcttactaccatttggaaatgggatttcttgctttgatttaaacaggctttcttaacatattcacagctacattcccattacaaattttcaagtgtaagtaactatttctgcttccgataaacaggtaacataattaggcaaataaggcttattctcatgcaaaggtaacagtaccaggcaagacctcagagtcaagtcaaatataatagtcaagggtaaaaggaagtgaagagggaagaattgggcagtggggaaatcttttgtgtgggaaaaaatgaatgtgtaaacctgttcttccctaagatttcatcaggttttgaatgatacagagagctttgtgcacagggggtccagtagcacatggtttgggtctaatttcaaaggcaaattctggtgaaatctgtgactcacgccatcctaacgggccacatgtcaaggctctgtggacaccctacaggcagccctgtggacccccaacaggcaagcctttccagatgaatgccaggccaatgtctacatctgatgacatggggcaggatatctctaaaaaataatacttccctggccaatggactgcaccagttactattataaagtgtaaaatattatattacatatgtgtaatgatttttaatttcaggcatcacagagatgcaattaaatatatgggccaaatgtttattctgcttaaagacaacttagaaatactgatgccaggctgcatgtggtagctcacgcttataatcccagcactttgggaagctgaggcaggcttgaggtcaggagttcgaggccagcctagccaacatcatgaaagcccattgctactaaaaatacaaaaatcagccgggaattgtggcaggtgcctgtaatcccagctactggagaggctgaggcaggagaatcacttgaacccaggaggtggaagtcgcggtgagccgagatggcaccactgcactccagcctgggcaacagagggagactccatcaaaaaggaaaaaaaagagaaaagaaaaaagaaatactgatgacataacagataggaactgcaaagatgcttgggccccaccaaagtcaggagtttggaaatgccacagatcttgaggggtaataagtactcatacattttcagcaatacctctgcttgtcctgaatttggagacctgggcttcagttatgccatgagtacagaatatgttattattttacatcaagcctcaatttccaaatggtaaacatcaggaaggtgaactgggaagtttcctaaggagctgttgcacccaacacatttatgaaaatcttttctaagtctctcctatacaatatattgatggcctcaatggggagaagtcatgcacatgtctcaattttcatgagcccaatgggagcaaagaattcccgggcaacgcaagcagatataaatgacatgatacactgaagagagtataatgttatctaagtctgctccactgtcaagtccacagatgaaatgtttcagtccaccgaggtgatcacttacatgttattaatgtgttagaaaacctaatattacttatgtctctaggtatggaaaatatatcttgttcgtgttttatggatgaaaaatgtcaacaggcaaattaaaaaataattttacaacaaaaatcaccatgttaatggccatttaattggaaatctgaaggataaagtaaatttcattgtgattgcaaatatcagtgaaaaagaagattttattggtgttatttaaatatagttctctggaacacacaagttgattcacagtgctcctgctgctgcactgccgccgcctgacagcctgtcttatccgccaaattgctcattaggtttggcaattttcacctgcgcctccagtttatctttcagcagggaatacacatcagtctgcttttaccatcttctgcagtgagcttccaacaccccacagtagcacagtgtccctgatctgcaaccctccaaacacatcttgcatatacaccattatttttaaatgccaatacagctcccagttttctaaccaaaactacgggagaatatgcaaagtaagccctgtattacaaatactaagatgaccaataatttacttaattttttaatgcaaaaaagaacacataaaccatataaacttaatttcttaaatgctcatcttaagagagtatttctgagtggggtgcaggggacaagagggcagaggatcctcttccaattggctctgacccctccaacctttgttacaggtcagaaaaaagagtactccaatttataaataaacaatagaggtaacgtggcaacgggaacaaagaggtagctgagagtactactcagctctctgcctgtgcctgattttgccgatccctgccaatgagcactgtgacattcagatcaattaaaaaaacaaaaaaaaaaaaacaaaaaaggagatactttgtgggcaaaaagcaccaaagatataaaacaaaatgtctgaaaccccataaaacaacttctgatggaatactgtttttcattttgcagaagtaaaatattcaccaccaaccctgcaattagctagaaaattacaataattacagcaattttgtatcccatctccaatccaattaatagatatatgaccttgtcaacatgtaataatcagattgcatctacaacaaaactggatgggttttatatgctgaatagaacttgcacagtaagaaggtaattatttgaaatactgagaataccatttgtatgccatgctccacttcacaagttaaaaggaaatacaataggaatattatttctatttgcaatatgtacttacatcagatccagaaaatagtactctgataccagcaaatgttagaaggacagatctctataccaaaggtgttggatattctagaaagacaaaatcaatctgtatatgcttgctaagaaaaaaaattaagaaatcaagaagtgggagggggcactaacttaggtacaagctttctataacaattattgatatttctttaaggtctaaatgttaggaagatagtaaaatcttatcagttaattaaataccatcatttcagacaaatttcccaagtaatggataaaaattaactaaaattaacatagctaataaaaagttaaaaataacaaaagatttaaaaggcagcaaaaaaagaaatgaaataaatcagatactttgtttccccaaatttttatagcaacaccatttccagaaatttcaccattcctcgggcttacatcattttcaaaggaaacttcattcttcagtctagatcttccagaggagatatttaaaaatttgaattgtgaggtaaaaggaatctagccatgacctaaacctgggctaccctcaaatatctgacttctacaaaaagtccttgggaactgaaggaaaaaaaaaatcatagagtgaaaaagtcatacacaaaatatcaccagccttggactcaatgatttgcacctgaactgtgtgaccctgaaagcttcagatctaagcctgatttgttaatattgaaaataaagacagttaaatgtatatcacagacatggttccaatttgactctgtaaaagttccactccatctacctaaggggccagtagtgtcccattccagaatacatgtcctagttacttgggctgagtaacgtctcaacctctttacacatccccaggaagtggatctgcactcaggagacatgatcgcgcacaccattccacaactatctgttagtctagtgcttctcctgtgtcacaggctgcattagaactgtgaacattatctcattactatacaaaaccatcctgaggcaggtactcaaagaggcgaccagtgtaattacctactaaccttgcccagtgtccaagatggtgtgactctctttcctgtactctttctgaaatgtaaacactctatattacaaaggagtatctgcataacaagctcatgttgaaagcataagtagaatatactcccataaagtataatatacactcaaacttatcaaaatctgggtggggaaaaaaaccccaacagttatgtagaatatctagtaaccagtttccttcagagcagaacatgcatctacctgggagcatgcaaagaccttccgagagatacattttaaggtatcccatgtcaagctcttcgtgttcaatatgcatcattccctaaaaaggttctacgagcctgaaaacaagggggtcaaggtgtaatgtggtttcttcccatccaattctccatggtcaacagccccaaagccagtatgtccatgaggcagtgtccagggccacaataagtttagaagcccaggatagtgttttattttcctttaaaatcaaaacagaaaaacaaatttttagagtcaaagaaaatgttttcacttttttctcatatcagaagaaaatgatactcttaggaaccatgaaaatcaattcaatgatgcataaaatggaaaaagtacaatactgaaatatttaaagttaaataaaatataattttatgactgatattactatggtgagggcggcccatgatggccaaagcgcccagagtccaggaaagtcatgatagtgtcctgaatagctcttctgctttgcaaaattaaaaaacaaacaacaaacacacgcatcgaaaaaatgacaaaacaacaaaaaaaaagcatcacctgtcctgaatcttacaattgatgtacaactgtgcataaaaacttccaggatgacaaagcacagtttaatacagcagccacaaggctgagaacataaatccctctggataacaaacacttttgccactcaactagtttctagatccctcctttcaacaaaaaagaaggatatcataagccagttttcagctcattgatatatctataaaaataatttctgacaaaggatcactaattggtgtttagcatttaacttggagggaattagaagaattgagtaatactgatgtaacaaaactccatttactccctaagttctgactctccttccaacgtaggaacaaccagagaaagccaaatatgaaattctaagcaatcacaccatatatgcccctcttctaggtagcccacctgcagctacctcatgccagcagtttccaatcagagcacactcaagccttcccatttctccatgcaaaagcattcccactcctcagcctgcctgggagcctccgtcaaaggcaagccatgatagctgccccctaactacagcaagctctgaataaatagccttcacctgttctcatttggatggtcttcacttatttccacattaaaaagcaaaacgttacatatttgtatatttgtgctattttgatctattatatattaataatcacacagtactatatttaaaattttaatgtactttgtttgttgcaaagaaataagatgaccaataaaaatattcaagcctaaaaaagattaggttaaaattcggtgctatatggagtgggggaaaaaagttcaaagagaaaagtaattaaataaaccttcaaactactaagaagtgccttgagtgtgtgtttcctttatttttttttaaagtacctttattaaggataattttgaaccaacatatagaagtagacagaatagtatactgaatctttaggtaacccatcccctagcctgtactattctgaagaaaattctagagatattgtattaatcataaataactcattacatactactaaaaggtaaaggttcttttaaaaataatttcaataaccttattgcatctaaataattccttactattaaatgcccaatttgtgttttattcatcagcatacaaatgtcattctttgtattaagcctcatttaaatcaggatttaaataagatccagacattatgattggatgttacatctcttaaaagtttctaataacttataaattccctctccatctctttctgcccctgcagttgattttattgaagaacgtgggccatttgtcttacacagtttcccaccatcttgactaggctgattgcacccctatcgtgttcacatgcttctcagggttctgtatttcctgtaaataggcacttggatttagaagtctgatcagattcatgattaatttcttttgtcaagactaccttataggagatgttgtgtttttttcatcaggaggcatacaatgtttggttgtctctccttgattattattttttaatggtgactgtcttagttcattttgtcctgctctaacagagtacctgacactggtaatttataaagaacagaaatgtactctctcacagtcccggagcccaagaggtccaagatcaaggggctggcatctggagaggaccttcttactgcatcctcacatgtaggaaggtggaagggaaagagaatgaatgcagcatcctcacatgacaaagcgacagagtaaccccagtacttcaagctctttttatactaagctatttttatgctaaactcttctttttatactaagaagtaatttttaatacatatatacaaagtgatttcctcttcatctactatttggttatacagtgataccactcatacaaaggatacacagaatagatttctttttttctttgtgacagactctccctctgtcactcagtctggtgtgcagtggacaatcacagttcactgtaaccttgatctcccaggctcaagaaatcctcctgcctcagcctcccgagccacagcgagtgcagtcacacaccaccatgcccacctaatattttgatttttaatagagacaaggtcctttataaattaccagcccgggctgttaattttatctttctttgaacagttttccaaataataagcaactttatgacctgaacacctcccattaggccacacctcccaacactgttgtactagggattacatttccaacatgtaaatttggggggacacattaagagcctagcaatgatcagtacctagatccattatgtcatcagaagttgcagaatagtaatattccaatgctaccattatgtcttcatttattagctgaaatacttacataaaaagcaagtatttggatatcccgtgaaaccacactacaaggaaacgcagaatagatgacttattcctgctttcctttataaggtttccaaataataagatggctcactggtagccttctccttgcttgctggcttctttattatcattatacactcatgcatgtattgctgttgctatctgtattgatgctcccactgtcccgtctttggccagcaggagcatcgtgttgtctcctaggccctctggcccaccctagtaatctttcataactgccctattttctgatatgacaggatgatccaggatgatcccatacatttcctgtacaggcttgcattcaggcatttctctaagaagctctgatcccctcaaatgaaaaatgctatttccagagcatagtctggattgagaaatgctgagttactgggttggtcattgattctagaccttttctgtgaatatacacaggagtttttcttccctccacgttccttttttaaaaactaaaacatatcaggaattaactatgacatgtctaaactgaggactatccattttttgttcattctcctttaacttatatctgtacactttttcttctatactaagaatactgggtactcaatgacaccaggaatgacaaaattagaatattataatttcccatctctttcatcctgtaatacccacccaaaaatctaagattaacaataccaacgacaaacagtttccgggtccttgtcattaggcagttctttttttccttaggatacatctccctttgtacaaattcctttgatttaaagttaattgaaatagttactcttgttatgtttaggctaccaaaaaaatatatttatggtcagatatttcatactcattttttgtctttaaaattaaaatttattaagtgtatgaatattaatattcatttgaaatgtttactgtaaaaattaaaaattgatcattttataattgtgtaaaagataatatagttccaacctcaaatatacagaaggaaatagtatgcatctagtttctattttacttcctccatcctattctctcccttctccataggttggttagttggtttgtttggagccagagtctcattctgccgcccaggctggagtgcaagggcatgatctcggctcactgcaacctccacctcccgggttcaagagattctccatgcctcagccttccgagtagctgggactacaggcgtgtgccaccacgcccaggtaatttttttgtatttttggtagagacagggtttcaccatgttggccaggctggtctcgaactcctgacatcatgattcgcccaccttggccttccaaagtgctgggattacaggtgtgagccaccgcacccagcctggattatcttacttaactttctcatttcttacatttttattaactagtaatcacatgtttgtcttctagtttaagagtgttattcaggatactgttcaatatactggaatcaacaaaatgtttctcaagttttaagttaactgctattttgactatacaaacaatgatgtatttaattcagggtttctaaccgtggcactactgacatctgggctgcagagttctctgatgtcggattgtcctgtgcttgtaaggtatgtaccagtgtccttgacctctactcaatgcccaactccaccagttgtcacaaccaaaaatatcatcagacactgataaatgttccttggggagaaaacacttctgaggttgaggagcaatgattaactaaatcagagttctctctgtattttctacaaaaaaaagctcagggctaaattaatggcagcttctagggaaacataaaaagacctcaagatgagaattccatctatgaaaaccatctaggctttatcttaatacccaaacttcgtatccatttttctatggaaaaaaatacatactctatatatttttctcaacttccaccaattctttatggaataaaggggatgagtgaattcattcattggaaaacacaggaaagtgaccactccttctttaaggcaaaaattagaaatttatttatcttcaattaagcaaatctctacatattgttggcttctttcttttcatatctgtaaatagttagactaccatttactactaactatagctccttgatagcaagcgccaggccttattaactcaacccaggactcaccacctagcacaaggcatggccagtatggacaaattcatcttctatgtctgaatgaacgtcattaatgcggtggcaaaaatcaccttgacaggtgactcatgtgtgatgcattacgttcacatagttatggacctgtgtatagtagatgcttaacccaatgcctgccaagatctgaaaatctaaaccttagcataccaaaatgagaacaagaaaataagatttgcatattctcccactggtggctgcaagacaacacatatgcttcaaatgtaacttctttttctcaataaaaacaagataaaaagagatatttggggtttaaaacaccatttaaattttaacacataaggccagtcaaatgtggatggttatgtgttagaaattttgttgagtccagaggagtcaaaaggtaaaaattgacggaaagtatgttaatcaaattcataaatcaacataaagaaattaacctttcttctaatattttttatggtgtggctatattaaagctacaaattgctttagaaaagatacaagtacaacactacaacggtaacacaacagaaagttctgtatttaagtatacacattacagtgttattactcaaataaagacactattttccaaacttctggtatctgaatacctgaactactatttaaattttccatgagtcaaatttaggcagtctacattgtatacacaggatcattccaagcagatatccactaagtcgtaggcttaatgaactaataaaaaatcaaccagggtaactagtgtaccacctgcacatcattttgtatacgctgtatggtacatgcctcaccttttgaaaaacactgcccaaagcaaatctaatgtaagaatttttaaacagtatatcctagtagtcaacaaaattattttcacaaaattagtttcttgcatatgtgcataaataaagctaaatctcttgcatataaaaaatattcaactaaaacaacttataggttctgttccaccccaagtatccttggaaacatctgtcattgtatctgagtccgatcttgtctggatgatagaaagcaattgtaggaagtggttagcactggtctgtagctgcacgcaatcctctagagcatcacttacgtatcccatcttgaactacaccttctaaattctctacactctgtatggcgcattgtcctgtgggttctgatgggctaacagatctctaactgttaaactgctcttctttccttgttctctttatatacaccttcaagggacaagagaagcagaagtagtttgtaaacatctagaagcaaattgccaaattactacagattgctatcaatgcaaaaaaagggaattaggatgcatttttagaagaataaattatatattctaaatattatctacctatattctgtatcttaattatatatatattttattaacacatattattacccatctgtttataaatatctactgaagactaccaatcagtaaagacacgtaagacccaaattttctacctgaaaaaaactgaagtgtttccaaatagatgtacctaaaaaataaataatccttttttttttctctcactctgttgcccaggctggagtgcagtggcacaatctcggttcactgcaacctccatctccaacctccaatcgttcaagcaattctcctgtttcagcctcccaagtagctgggattacaggcaaccgccaccacgcctggctaatttttgtatttttagtagagatggggtttcaccatgtcggccaggctgatctcaaactcctgacctcaggtgatccgcccacctcagcctcccaaagtgctgggattataggcataagccaccccgcccagccaaaaaatcttttaaccttacacatttattgaaattgatcttctcttaacaactgctcaattacaagattatacaactataaacactaaatatttgtagcaaaaatacctgacttttatgagtaccttccaagaatggctaacagaactcttcaggcaagtatcccagatctggaatacccagggtcctaggattcctcatataggactcactatgtccatattccccttccctaaggaggtattctaatcactgctctcccaaatccctgaagataactttgacacggcggtctcttcttccccagctcttcagataaagttcaaataatataaatgacggttgtaacagagttgactgtaatgaatgatgctacgttttgtttcagtgcaaagctctttggtcatttctacttgttctagcattcagataaacatatggaaaggaaaatccaaataatttaacttgaactattgtccttatttacagttagcgagtcacggaaagtctactagtcgaaagtaaagaaagcctaatctattacaatgtaaagaactgcctacttctcttgcaaagaacatttgcctgggtcctaaacttaatttttgaataaaacagataattaattccatttacagggtcatggatgaataacaaaagttggtattcctgtaaattaagatgaaatggaagagaagaaagagctttcacttacttgctcgaaggactgaaggtgtgacctcaatttcacttgttgcttggtaaggctgaaaggctgagacattgttggtgccaagctcactaccaaatatctctgggctctgggtacccgtggaactggcactggtgccatcacctccgtgatgtggatcctgctcatcaaacactgctaccagctagaaatgaaaggtaaatgtgcacttataaataaaggcacttaattaactaccaaaattttgtactattttgacataattctacagtgcaaaaatactgatataaatgaccctagaatggtaagttttacgaagaaaaacctcaaagaaacagtgtttccctaaattttgatgctttacttgtataattctaagtcgtacatttcacattcaaaagtctatgggtgaaaaaataataaaattgtttgctatcacagcatgctaagtcagggacagatataaatcttcttaaaaatataggatatttaaatggaaaagaaaaatgcaaaagtgtgtatatatatgagtatacatatatatctgtgtgtgtgtatacacacatggtatgaactactattcacataaaaaggggatattaaaaactaaacatgtatcttctcatttgtgcataagatacatgctaaagacaaacctgtcatacaaatattccagttagtaaatttgtttctctttagcaattcttactctactacacgccccccacacacacacaaacacacacacaccaagaatgaacaaaagagtgcaaatatgtttgataataaaagcagatgttttcacagtcagaaacagaagttacagagaagaaaaagctagaataaactggtgctcagaatggaatccaggacatcagtatgagctcagtttttgtttgtttgtttgttttgttttgttttgagatggagactcactgagacgcccaggctggaatgcaatggcacgatttcggctcactgcaacctccacttcctgggttcaagtgattctcctgcctcagcctcccaagtagcggggattacaggcgtatgccaccacacccagataatttttgtatttttggtagagacagggtttcatcatattggccaggccagtctcaaacttctgacctcaactgttctgcccgcctcagcctcccaaagtgctgggattacaggcgtgagccactgctcccggccaaactcacagtttttataagtacatagttaagtaaatacaccgacaaatgggtaagtatatcaataaatgttaatgaatgtgtgagtataaagagttcccagctctgtccacacagagatcctagaaacaatggcatccccagtgccactgagcatgcctagtacccagatcgtggtttctaataccattctccagttaatgaacaagggctccttgaaaaatggttgatttcagggctgtggtcagggaaacacatggtaagcctggaatgccttgtgatgtcaaaaaggggtactcaaaaatgatgaaggcacatcaaatggaagcaggtgtcaacctgaaggggctcccaatggacaaagcggagacaacttacaaactaaagaaatcatactggcattggatcattatccaaagaataaactaaaatccatgagtccataatgatataaataattgaacaaataaatggtagagaataaacagctgttccctgctgtagcattccaaataataaatagaaggaatgatggcaacagaaatcatcattaggcaacctccaccataaaaatcgttcaggtaaaatctactaatggatactaacattaatgggtgtgaatatgataataacaggatatttgcatagctcaaaatgtctccccagaagagtcattttgactaaaaagcaaaacagtaatattgttgaagtggagaaacttggcagccactgctgtacccaggttaacgtcattcatagtaagatgcagcaatatcaagtaccatctgataaaatgcactgggaagtatataacattacttttgtggtattcttgccaaaaatgtataacgtccatctaatcgtgaggaaacatcagacaaacccaaattgagggatattctgaaacataaataaggctctccaaaagtatcaagggtcatgaaagtaaaagaaagaacaaggagaacgaggaaattgtgcaaattggaggagtctgaggaagaatgagaactacatggagtgggaggatagaaaaagggcattagtgaaaaaataggcagaattctaatgagatctgattagttgacagtactgactcagtgtgagtttctttcttttgataattgttctatgattatgtaaaatgttaacattagggatagatgaagtgtatatggaaatactctgtaactattattccaagttttctgaagtataaaattatttcaaattaaaaattttaaatgttataatatttttaaaaagctataaaaataaaaaagtactctatgtcttcttataactaatacagttcttaaaatgctaatatacttcttataaatcccaaagcgtaggccaggcgcggtggctcacgcctgtaatcccagcactttgggaggcctaggcgggcggatcatttgagttcaggagttcaagaccagcctggccaacatgatgaaacccatctctaccaaaaacataaaaaattagccaggtgtggtggcacgcttctgtaatcccagctactcgggagactgaggcaggagaactgcttgaacccagaaggcggagggtgcagtgagccaagatcctgccactgcactccagcctgggaaacagagcgagactccatctcaaaataaataacataacataacataacataacataacataacataacataacataacataacataacataaaaatagaaaataaatcccaaagagtaaaaaacttctaaggatccacactggctgccaccttggagcttcacccttcaatcccacacctagcaactcagcttagccttccaagaaaagaaccatgactggaaccaaaataaacccctctcctgcctccaatccaagctttttcaaggccaacacttgtctcaggtcaaaaacagaaacgcgaatgtacagaatatgagtaggactcataattacagtcctcattttataaatggctttgtcgtttggaacaaatgctatttccatgaacatttatatatcatcaatccatttatcatcgacacaacaaagaaaaccattgtacagtcacaaagagacaggaagctcagaaacctgctgacgtatagatagaatcagctgattaaacaatctggaagaaccagtaccagggttcataccataccacggtaattggtatgaagaaatcacagtaggatgaataattgggccactcaaccttataatgaacaacataaatcagaaaagaagtccttaatagttacaaaaaaaagggaaaggtatgcatacgtatacaccaaaacatccatatatagtaaaatcagtttatctgacagtgacttgcaagtgtctgcctgtattagagacacagacattccactagattaggggtcaatgggcaaactttctcgaaaagaataagacagtaaatatttttggagctgtggcccataccgtctctttcataactactctactcactaattatagtatgaaagagcacccatagacaatacaaaaacaaatgactgtgactacatttgaataaaactttatttataaaataaacaggccaaatttggcccatggtccctagtttgacaacccagcccatctttctagtaacatgcaattttagtttcagtttgagcaataaaactaaaagtcaaggtacctttgtagcctcaaaaaactaaaatactcatttcaagctctgcatgaagattttggattgctatacttgattttaatatcatcatacttttcataaggtgtgtggcttaatatgcattttgaagatattaagttttgacattttggtgcttaattggaagcaaatgaaattcatgttttgttattaacttttcacaatgatgtgttctctcaagaatcgagtcctttctgcaaactgaaaatggagattgaaaattacaaagaataagtctttaaatgccacatgatggaagagcttatacatatatattagtttcaataattatctccagcatttttagaaaacattatagaaccacagttggtgatttgcaatatgccaataacatacaattgcacagctttcttttaaaccaaaatttaagtgccaggtcccaatatgaaataattttgtgttaaactgggaaagatatataattttagaaaatctactctataagaatgcatatagtaacacagcaaaaaaaaaaaaaaaaaaaggtggggggaaccttcacaaaaaactgcgtattaaaaatctccatcatgcccttcaaaaagtaaaggaaaagtcttttaaatttgtgaaatgttactcaaattctaatttaacagatggaatcttcactgctgtccacaaagtagatcattttgaatgttcatttttttccttgcaataattattaatctctcttctgttccattcatctatcaagtctccatgagaaaagacaggcagaatttggataacacctacaatagcccaagtagaaataaactctaaacattgtcacccactttcccctacctcaggacaagtcactttaactatgaaacatcagaaccccccaacagaaaacctcttatagaaacatcacacagaaatgcttataaaacccttggatctagggaagtccctttaataggtaaaattaagacctgaaagcccacaactgcatgtagcaaagtggctaacagcaatggagaatcagaaaaagctacattcaaagccagctctgaccttattttttgggtagctgttggtaaatccagtggcctctctaacacctccagaccttactctcctcatttggaaaagaggatggtggttgtgggtagacagaataatggtctccccaaagttatccatgtccaaactcctggaaccagtgaatgttaccttctatgaaaaagggactttgcagacaggatggaggttaagaaccttaaaatggaaagattatccttcattatccaggtagagccccatctaattacataagtctggaaaaatggagagccacgcctggctgcggccagagagaaacgtgatgatggccagagaaatactacactgcccaccttgaagacaaacaaagggagtcatgagccaaggaaagtgagcagcatttagaaggcaaggatatagattctcccctagagcctcgagaaaggagcacggttaacacactgattttatggcattctgacccatgtcagccttctaccaagcagaattgccaggtaatgaatttgcattgttttcagccacttatgcctgctctgccagatgtaggacaaataaagagataaggtatacaacttccagaacacaataagtatgtttactatgagcttttattaaattatattgtgatggatgataaatacgttctacttttgtaaatatgagaatagtttcaagagtaaagaagacagatgcaaagctcaatcgctgtgtcttggatctacacaggaatagtaatgggaaaaagaacacggaaagaagacagcatgctagaaaatgcatgttcaacatagatatggcacaaaatgaagaccttccacagacgctctacatcctcctctagagggccccacagaaacacaaagtcgtttttattatttcacttaacaggaagcaaagccgagcctcagagagatgaatctgactagcatataaataaatacagaataaatttgagatgggaaatcaagtcaaagatcctattttctccaaatcttcctgctctggagcatctaacatatccacagcacagggcactggcaggctacaaactaagattatctgcagacctctgaataggattctgttcgtttttgattaatcaaacgtaataacctgcctttaccaaattaatgcaattttgatgacaccacttaaaatttttctgaacatatctgagggtaatgaagatcatcacagacaattcatcctgctggtgccatcactcagtcttaaacagagggcttaaaaggatcaaagaacttgcagattctaccctcatacaggaaaatgaaagctgatttaagccaagtctaagtgaaatctcaaagacctctaggttcaaactccacacaccctgagaagccattttaatgtgacaccctgtgagcaatctctcactttccattgctttcttcatgtataagctagacatatccagggaaagtcaattatgatgggtgtcattggacactcaatgtcaatatatgcaattgttttcctatgaaataaagacttataattcttttaaaaaggcatcatattttggccctggataaagtacaaaacatgttggagaatactagaaacaagaataaacttgaagatgcctccatgaccctctcttcatctaagaaacatgagcagcctccatgagtcaagccagatccagcggcttagtcaacaagaagcacaacacagaaagtgcgtgtttgagagatgacagggagatgtcatgggcagatgtgcctataaagaagaatgtaacagaagagaatagaaagaaaattcaacagatatgggagaactagagcataatgaaataaatttcaaaaacttaacaataaaactaaaggagttggagatacatgcattttttaagtttgaagtcaggctgttccatgatgtataattctaaactatcactaattcaaaaatcacttttcgtctccatagtttataaattatagatttctataattaggatcatacctaccaatacatttaaattcttctgccctttcactcaaggatgtccaaaaaaattataaattagatcaagtatttgagtttctgaattcccctttttctatctcttatttttttttaagatttcatttacacttgtctcccataaagcacacgtgataacctgtggcacttacataaaagaaaaactaaccaaacactaacatgcttttgtagattatcacagtgtattatccaacataagaaagggagctaaatgagatcaatctttaataaagccatttccagcaaaatatcatgcaggagagggcagaacattcccgctgcttcctgaacaacacaggagaccaccatcatcataagcttctatctgtcaattgccaaagggagacctgtccgacaagagctaatgccatcctttaagaagaaagtatttcttgaacactcatgcctaatagagatattccactgcatctggaaaccacagtgaaagatattcacctatgatactccctagccctgatgcttacatttcagagctgaaatttaattctgttgtccctcagggtgacatagtctatcacccactgagccttcagactaattagattcccagtttaagacttatgttcaactaatagccttgagtatgtcaaccacaaaccacaatgaaaatatgcaaattcgtatagccatcagctaactgacccacctgccaaatataatataaacccctcttgctctactctctatcatgagtgccactgttacactggtatccacccatgaggttacaactacataacactactgcttaagtattaataaaaagtaggatagcacagtaagacagaacaaaataattcagaaatgggctaatcacatacagataggttgactccaaactggaggaagtggcacgagttgtgattttatcatgaacacatgcagtgttccctcaaagagaacatggtaagactggcaaatgggcaagatgaataatctcagaagcaaatgcgatgatgtagtaactaattattacgtagacacaacaaaaagggaactaaaaatcaatttgtaagctttctgatgactgaatttactttaatgacacagagacaatactaaatccttaatcattctctgagccttacttgctagcatggttcattaaaaactcatttaaatagagctagtgtttaactggacgagtaagcaaaaggatatatttgaaccaatgatgttttgtaatcatagtaatacaaactataccaataaaaactcgctacagaacaagaatcttaagcttgccactggaaaactttaaatgttatgcatgtgagattaattccacgcttcatcagcatattaagaagggtatatactgtctgataaaaaagacctaaaacttagaaaagaacactaaaataccatgagcacattaaagactagcgaatgttcctactggctaagccaagaatggcaaagtgtggatagactttctcgtacacagtaccaggaaacttgacctcaaacccgtctcaggctctagccccatggtttgtgatattagagcagtacctcacctatgggtatatgttccagccttgccactctgccaaccttccaacatatctaagagggagtaacgtggaaacaggggtcaacagcatagtgttctaatctgtgaacaatttagcttgacaattcatatgtttacgtgtatccagaaatgcctgcattaacaaatgataaataagagaatccctcaatagtaactctttaaattaacaacacagtctgcagtagggattttgcttaaaagaaaaaaaaaagattttttttttctaagaggcgtgagcctctgtgcccggccaaaatatttttattaatcaaaagtccaccaggcatggtgggtcatgcctgtaattccagcactttgggaggtagaggtaggtagatcatgaggtcaagagatggagaccatcctggccaacatggtgaaacctcgtctctactaaaaatacaaaaattagctgggcgtggtggcacacacctgcagtctcagctactcgggaggctgaggcaaggggaatcgcttgaacgtgggagatggaggttgcggtgagccaagatcgcaccactgcacttcagcctggtggcagagagagactccgtatcaaaaaaaaaaaaaaaaaaaaaaaaaatccaacaccatgtaggaaatagataggtcttaacgagataaaccaaaatctctctttctctcatacacagacacacacacagcctctctaaactgtaattaaaagacaaccaccaccaaaacccacagcaccaatcacaatgttaaacgttagtgagcaagcaactgggggtgaaatactttccatcttcttcctaatctccactaaacaccactcccttcactcccaggcataagtcacatcctgaaatctcccccagtccctacgctgtaatagtcccagggcatgaaaagctgccaatgtgaatgcacaacccagaaacatagcaggacagtcacgaccaggcaggagcatgccctgctctcctgctcctctgaatgtctgcatccactggtgagtccacaaaaacagagctgagatccttagtgggaaggcccttcctttctagtctttcagagctgagatctttagttaggaaggccctttctttctagtctttttacctcttcagctagctggatatagtaaaccagggcttggttccacgggtggggagcccttgtctccatacccacacaccaccctcaaaccctcctcctgctgtgccaccagcaagttacgaatgtttagatgcagggaaagtaggagtcccacttaagctacaactgcctcctcctaccaacttgtaccgttgagctccctgctacagttcatatccagtgtcgtcagaaacaagggtaattccgtctctaccatcaagtaataccatctcacagaaccgagacattccctcgttgggcttccttaacgcatcactcattccattgttgaacttgtaaaaaatgactcatcactaaaatgtcttgccatctggtaaactctatactttattttttggcaatcagtagtggaaaacttttcattctaaaatagaaacttgaaggatcacttccttagtcctaaattttgcaaattatatttaaaatgagaagcactagaaaagaaaacttggctgtggctttggccaatcaatcagaactgggaagcagttaagcaatttgcacaaagtcatggaaaacttctccacacaatgttaggtctagagatgatgcagcaggggtcagcacatcaccagccctggcatttaaagacaagatggtatttccaactctaagaactagccttgtttccaaggcaacctgccctttgtataggggactcacttgggagttcataatccctttacctgctgacttcacaatttgaacaagaacctcagcaatgacttagcttccatctaaaagcatcacaagaaaaactgagggccgtttaactactttaaaggaagaaaggaattcagatgattctattaagacatgggctggagtggggagggtagatagagaagaaaaaagtgattcagaaaaaaagaagaaagtagaactaggagttgctgcttaacagtgatttattttcaaattaagatatatcaaacccaccacttctgttcacttcaagttctgaatgaaagtccaggtgaaaatgacacacaatgaaaacctcaaattcattctgacaaccacaaaccaatattagcaaaagatcaaagttcaataaatttattttgtaaaatgtaaggttaatattacagtacaaaatgactttcagtttaatttgcatgcaagaaggaagggtgtgatttttaaatacccacccaggggcaaagatgaaaaacttcattttctgactccttttttgctactctcattatttcaacaccttctacaaaggagagataacggtgtccttgacattagcctaaattatcttcagtatgcaatacaatactgattaaattaggctcattttaatcaactggcaggtttattcaaaaagtaactaaataataaaattctttttatcaactcttcattagtataacctgtttagcaatgtttttaaaaaactgaacacagaataaatattgtgtgcccatcttttcactcccatatttgacaggtaaaagaaataacttgcaagttaaatatttcccccaatccacaaattgctttaatactgaaatttaatgccaatcttctggaaggtaaatactagtgccatctaatggacttagtcaagcacaaagagtttaaaaattttaagttttaaagaaaatctattctaaggaaagccaaaccctctacttgccttcatttgcttcccaagacaacgtccacacaagtgacccagaataatggagatggagacactttatcctgcggtttgccaggaattccactcattctaccaccacaaggttgctaatcatgaatgagctctcaagatgagtcagcctcaaacaactcaccagctgcgtggccctaggtaacttcttcactcctctgggctcagtagtgataggttttgttttgttttgttttgttttgttttttccccataaatttcatttgattatgacaaattgcttaggatgtttcctgtaagtagcaagtttttaagaaatgttactaatatttgagaaagtttcaagagactgaggtaatcaagaggggaagatgaaagacaactaagttaagccatatagactttatcctgaaaactgcggggtgtcattaacacacagcagtttaacttgcatttattctgcacgaggtttcaaggggtatggagaaggactaggagggtaaacactcgtagctcattagtctaataatgaagaagtcatgagggccaaggctaatggaaaggtggtgaaaagacaatcaggatgtataattattcaaatgcagaatggagacttatttaaaaggacttggtatgtggtggatgggtgccattatgaaggaaaatgacagattttaggtgtctaggtttgtcatttgggtggttgggcagaggacaggcacaaggacaaacaaaaacaaaagatgatgcattcagttacagggaaaactatcacatgctctcagccagttcctgggacacaactggagatgggagtccatggtacaaaaaagagttcgaggctaactacttgtaattgggtgccgtccacacttaggtacaattgaagccacaggtttcatccaatctgaatgcggatcacccatggaaatcagaactcaaacctgggtaactgctgagattgcaggttcctcttcccttcctccaaaccactttcaaaggattttgagaactgactaaagaatataaataaaatcaaggaaacagggtttcacaaaactagggaaagaaaagtagcatggaatagctggatcagcagtactcaacaccacaaggaggcccatgagctctttctctaacaaggacacatgtgcattatcaccccagtgctattaaacaggtgaccctagaacaatgcagggatgcaaaccccccacacagtcgaaatctgagtataacttttgactcaccaaaaacttaactaccaaagcctactgttgactggaagcctagccactatcatgaaacagttaacacctattttgtgtgttatatgtattccacactgaattcttataataaagtaaacctagagaaatgaaaatattattaagaaaatcataaggcaaagaatatattttttactttacttttttttttgagatggagtcttgttctgtcacccaggctggagtgcagtggtgcaatcttggctcactgcaacctccacctcccaggttcaagccaattcccctgcctcagcctcctgtgaagctgggattacaggtgtgcaccaccaagcccggctaatttttgtatttttagtagagacggagtttcacagtgttgaccaggctggtctcaaactcctgacctcaagtgatcctcctgcctcagcctcccaaagtgctgggattataggcctaagccaccatgcctggcagaaaatatatttaataatcattaagtggaagtggaccatcataaaggtcttcatcgtcatcatcttcatgaggaagaagaggaggggttggtcttgctgtctcaggggtggcagaggcagaagaagtggagaaggtggaaagggaggcaggagagacaggcaccactgtgtcactttacagaaatacatcacaatgtctgactttttctgttttttttctctaaaaatatttccatacaataccaacccttcttccactgttcgatttaattacagtacacatatcacagaagggtccatattataaaagaagtcaaaaatagtcttgaataatcagaacccttctgtcagatggtgtaattttggttttctggcactgcttcgtctctgtcttcttcctcatgatcaggcactggttcggaaatactcatctccatcaagttattttctattaattcctaagctgtggtatctatgagctcctgaatttctctgagactgatatcttgaagtccttcatcccccacttttttggccatatccacaatctctttaatgatttccttaactggctttgttgtcaattttgtgaagtcattcacaatatctggacccagttgtctccagcaagaatttgttatttgggatttactggctttcacgatatttctatcacaaggaaggcaccttcattggtaattcttccagactttcataataatgttctatcagtggtcccttccatagtaacgaccatcctttccaaagggtactgtgtgtaatgagccttacaggtctaaattagagccattgtgtttgaggcaactagactacttcaacgccttgaactcctggggctctgggtagccaggggcgttggtcaatatcaaaagaactttaaaaggcgacagtcccttactggcaaggtacttcctgtcttcagggacaaagtatcaatagaacaatctggaaaagtgttcccagtgtccaggcctttatgttgtgcaatcaaaagattggcagctggtgtttatcttttcctttcaaggctcaggggttagcagctttgtagatgagggcagtcctgactgcctctgctcaatacaattgagttagcctatctcttctggacttaaatcctagtgcttgatccttttccttactaataaatatcttttgctggcattttttccagcactttcgtctgcattaaaaccgtgtttaggcagacactctttctcctcaatgattgtgcatctggaaactcgtctgctgcctcttggttggcagaagttattaatacttctgttagctgaacatttttttaagccaagcctctttaaaaaattatcaaaccatcctttgctggcattaaattctccagctttaaatccttcagcttcttgttgctttaacttgccatgtaatgacattactttttctcaaatcatattagtcaataggtgcttttcctttaaccatcctgcatccacataaaagccgcattttcaatatgagatgaaaaggtatttcacaaaagtacaaggtttttgtgcctgctggcatacctgcagcaacggcttcaggaatttcctttcttgttttttataatggtccctacactggattcatttatcttgacatggtgggcaactgcagtagctgcagacttcaatctatggtacatatcaactctttgttctaatgtcatgacttttctctccttttttgggagcatttccagcatcactagtggcacttcacatgggtcccttggcgttattcaaggtttacagtttcatattaaacatgatgaaaaatgcatgagaaccaagagcaattactttttattgtgatatgcaatttcctgggaagacaaattgctcacaaggagatgatgagcatcacactgcactttaagcagacacgcacaacactcgagctcactgcaagtaacaacaggagggggctatgatattactatagtagtgcagtctgtgctacagttaattttatgcagttgcgatttaatattgcatctttatggttacttacatttctctcaactgtgaatggcaccacgtatgctctgtgtatatggacgttttgataaattttaacttcttgtaacagatttttgtatattttatggttgtaaatgacagggtatctatatatatattttacacattcatgacatatatttttaaatttttttccttatctcgctacatagttcatctaaaatttttaacatgccaaatctccaaaaatttttccaatatacttactgaaaaagatccatgcatatgtacacccaagcagttcaaacacaagttgttcaagggtcaactatactttttaactattatttctgagtagacaactttgcaccagcttataaggctgggctcatcacgtgttttctttatatttattcttttgttcacaccatgtgcccgctatgtgccacatggtgtgaactgtgtgaagtgctgcttatagaacactttgttaatctaataaagctacaaatgaactttctccataaaaacatgcacagagttgtttcgttctggatatactttcggcagattcatagatccttgttctatgagaaattagaagaaaaagtacattttctaacattcacttaaatatcaatgagcatttcctcaattctatgacatcactctgacactacaaagttacatattagcagagtgtgaatttcttctgaatatcttctaactctatttttacactgaaagatctcttccagttgttctactccatttttctactttatgatacagtcatgtcacttaacaacagggatacattctggttaggtgatttcattgttgtgtgaacatcatagagtatattacataaacctggaggtataccctattacacacctaagctattatgttacagcctatttgctcctaggatacaaacctgtacaagatgtcactgtactgaatgccctatgcaactgaaacacaatggtaagtatttgtatatctaaacgtatctaaccaaagaaaaagtacaataagaatatgggattataatcttatgggaccatcatcctatatgcaatgcaatattgaccaaaatattgttattcagtaaatgaccatataaatgtacgaaggcagaacctaaaagtaaacaatgttttaagtacacctggacataaagatgggaacaatagacactgaacactactagaagagggaggaagggaaaaggacatgcgctgaagaactacctactgggtactatgctcactacctggattgcgggatcatccataccccaaacctcaacataacgcaatatatccatgcaacaaacctgcacatatatctcctgaatccaaaataaaagttgaaaatatttttttaaaaaagcaatattcaatcactctatatcaactataagagaattataacatgagaataccaaaaatatgattgcaggcagggtgcggtggctcacacctataatcccagaactttgggggaccaaggcaggcagatcacttgagctcaggagtttgtgaccagcccggacaacatggtgaaaccccatctctactaaaaaatacaaaaatcagccaggcatggtgacacatgcctgtaatcccagctactcaggaggctgagagaagaatcgcttgaacctgggaggcggaggttacagtgagccaagatcgcaccactgcactccagcctgggtgacagagcaagactccatctaaaaaaacaacaaaaaaaaacagactattgacccaaaagtacactgttactccttggattaacaccatttgccctaaacatctacatccactagaaatggcaaaacagtcctttgcaattctatctgttggcaaaaatatttcagctctagaaagcattcagtacgtcggcaagagataataaacacccccatttccatgaaaggctgcacttcaatttccacatagccaacgggttaacttttggaggcaggtctacttgtaaggcaacaagtatcagtgtgaggaggtcttaagacccagaaggaaaaaattagccgggcatggtggcgggcgcctgtagtcccagctactcgggaggctgaggcaggagaatggcatgaacctgggaggcagagcttgcagtgagcagagattgtgccactgcactccagcctgggtgacagagcgagactccatctcaaaaaaaaaaaaagacccagaaggaatgtgaatgctgtggaaatgcagacaggaggagtctgtctgggtcaagtcaatggaaagaggtgagttccactccaaaggacgggcgtgcctctcaggctgaagagcggcaggagaaatttgagggggcagccctggaggtcagaagacaaagattcaaatccacacattttcactgactagtgggtgacattgaatgggtcacatgagctctcagtgcctcagtttctgttcgtctaataaatgaagagggctacaatgccaaccacaggaagttgccataaacttctgaggtcattatgagcaaatgtgcctgtatatgcagacagtgaacaaaatcacaggcacaaagcaagtgagcccaaggtccagcggctgcagaacagtagggacggtggttgatgttgttgttgctatcattagtatcatcctaatttagggccaggcatggtggctcacacctgtaatcctagcactttgggaggccgaggttgggggatcacttgaggtcaggaattcaagactagcctggccaacatggcaaaaccatgtctctactaaaaaatacaaaaattagccaagcatgatggtgcatgcctgtaatctcagcttctcaggaggctgaggcaggggaattgcttgaacctgggaggcagaggttacagtgggccaagatcatgccactgcactctagcctgggtgacagagcaagaccttgtctcaaaaaatgaatcatcctattttgtctattttgcagacaaattgtagtcctgagcaggatacccagggtttaagaataatattaagtgcaacaaaaaaattatgtaacaatctacataaaactctgtataagtagctgctttgaatattcctacgttttaatccccatatgtcttgaggaagtatattggcatgggtagaagcaggaagagattaggagaatggaaagaagaaattcttctaacacattagcaaaaagtgttaagtattggggaaaagatcaaagggcttatcgccatcagagaacgctgtcttggtgtgcctgaaaatcccccatctaagacacaaagggaaacagggaagtcaaaacggataccagacagttcatgcaatgagacgagagtatttcagcatcttccatgacgaagaacagtaacacaaattaaaacagagcaatattaaagtaagatatgttttggggttttgtttctttttttgagatagtctcactctgtcgcccaggctggagtgcagtggcgcaatcttagctcactgcaacctccatctcccaggctcaagtgattctcctgcctcagctgggattacaggcgtgcaccattaccacctggctaatttttgtatttttagtagagacagggtttcaccatgttggccaggctggtcttcaactcctgacatcaggtggtccaccagcctcagccttccaaagtgctgggattacaggcgtgagccaccctgcctggccaagacagttttaaattaatgtttaacccacaattatctttaaaaaaaaaaaaatagttaggctttaaaaagccaaatctgattataattaactccatgtcaatgctcaaaattttgttggtacaaaaatgcttttccttcaaagacagtaaacttactggacaaacacccgagctggtttttagtaataaatctagtcagtactgttattaatagtgttgttaaaaaaaactgagaacgagagtgtattctgtcaatcaagagctgataaaacattccaaaaataatcccaagttcttcaccactgattcatcaccaattcaaaactctcgttgaaagactttggtgtctctcccaccattcaccttgacctctactcaacacctacgcttccacacattggagccacttgtaggacttcagtataacaaaaaaaaaatttttaatattctaatagttttactcactccctcaaatatgcatataaaaagtacttaaatcatttaatgttgttatatcttcaaatctacagtgactacagtgacttcactgaacagaagaaaatttggagaaaaactaagtctccattaataatcaccccaaacatctatgaaagaagtaacagtgctagcagtactgctttacaataccaacatgtttcaaagactgtaaacaacatgtcaagtatccaagtgggaaaaggcctaagctcttatctttaatctctcagttttctaaaaacactatttaaaacctatataaagatattacaaggaaacactatttaaaacctatataaagatattacaagtactgaatcattatttcccaaaaaccatcacgttttcttgtagaaggtcctgaaaacatctcacaatctttagtgtggacagtgtccacaccagaatacaatcaccagtgtgaagtcttgaattatggttctcaccattcttggttgaacctttacagtggtacctcctgtccctttgggttggcacagtggccttgactcatcaccctgctcttctaagcagaagtcaacacagtcaacaccttggatgggacataattaatttaaaacattaaatttttgatattcatgaccaaaagactgaaagaaaaagtgatgaggcccctaggtgggtaactgagcgaaagaaaaattagggcttcagtgataaacttaattggggtcaaagttagaaatataacaggaagcaacttctaagttttgtttttctgttaagacacaaggtcttgctctgtcatcctggctgtagtgcaatgggtgtaactaagctcactgcaacctcaaactcctggactcaaacgatcctctcacctcagcctccagagtagctttgactacaggtgcgtgtcaccacacctggcttatgttttaattttctgtagagacagggtctcaatgtattgcctaggctgatctcaaaattcctgacttcaggtgatcctcccaccttggcctcccaaagcactgggatgagccaccacgtctggcccgtattctaactttttgattccttctcttgaagacctagtcaattctgaattgagttatattctgggtaaagaaaattaaaaacaaaatgaaaaaacaatttctggtgaagaatgagagagccaatgacacagaaggaaataagagcagtactacaaaaggagcaaccaggatgcatctgccaaagccaaggagacaatgggtgttcacagattcgaagtccaaccaacccagaccttgactacactggggtccacacttcccactaacaactttatctctgcaaccacagaaattactggaaatgtcttaatgccccaagaactggaagccactctgacaataaaatcactttcatacaccagtccccacagaccatggtaataaggagacatgacagcaaatacaaagaaaagccattgcttagacatctaaaatcagttatgtctttcaataccagtccaagaaagagaaacagaaactcaaacactgaccacattagtgtttatggtgaaacacaactctgattagacaattaacatccaggctgcctaaaactaaaagcaagcttcataaacaaaccactaataagctgttgcttcttctttggaaagagaaggttatttataaattgctgccacctaaaaactgacctgattcagtactgtcagacagcgaagtacacttaggcaagtggcaaatgacaagggaaaaaaatcacctcacaaagtgtgacacttcatcctaagtgtaataaatgaacaaaacagaatattgcacaagactgtgaattgtttagccgagatccgccactgcactccagcctgggtgacaagagcgagactccgtctcaaaaataaataaataaataaaatgtaatctttatagtttcccactcataaaaagtaatactgaagaaaaacctctgaattcggtaagttagggttcctagcatcaaatattccatgtgagatcttaaaaacaacaggaacatcaagaaatcagagcacctagcacgtatgaccactctgggagacactggctcaactgcctctgtccctaatgcaaatttaccagctgaaatccttcagagatacattcgctgataaacaggctacaataggtgtagaaagatgtgggtaatgactgactagattgcaacctgtctgaatcatagaaattgaaagaaaataagctttgccaagacacagaagccaagatttcaagcactttgggacatgcagttccactgctgggatgtttattcagaggtggctgtaagtttcacttcactctttcaagtatgtgctcgggggctgcacaccaaccgagggagtgaaaagaaaaatcagatcaatcttgcatgaagcacttggtgaggagtggaggccagacgagctgggcagaaagaatgaagtacaggaagagtcaccgggacaggagccttctaggaagaagaggctgcagaaacgcaggggtgaggcgccgctccggcagggcaccaatgatccaagtaggagatcatgctgagtttcttctccttctcattgtgagaaagcaaacacacagtttcttctagacctggaacaccaaccgtgacttgcaaacacaatgacacagattcatgatgccttgtccacaattccaaaatcaaatgactctcaaaatgaaaaatttttcataagtttgttagaagtacatttggtggcaaaagcaactctgaaccaatccaagattatttgtagtatttatttacttggtgaatattcacattttgctacagaaataccaaaattttgactacagggtcctgcctcagacatcacaggaggtgttacatcttatgacacatattccatattacctgcctaaaatctgaacaactcagtattctaacatccagccataatgattttaggtaaagtattgtggtgctcccagatgctggagccagtgaagactagctcatgaggactcttaagttttcaggaattttgcaagccagttattaccaccttcatcatttaaaaattaagatatataaacttacagttaaataaattaaaaagcagagtaataaataagtaaaactcagccaggcgcagtggctcacgcctgtatttccagcactttgggaagccaaggcgggcagatcacctaaggtcaggagtttgagaccaacatggcaaaaccccctctctactaaaaatacaaaaattagccaggtgtggtggcgggcacctgtaatcccagctactctgaaggcttaggcagggagaatcgcttgaacctgggaggcagaggttgcagtgagccgagatcacgacactgcactccagtttcggtgacacagcgagactccgtctcaaaaagaaagtaaaacttcctatcatctgtgttgcattttactactctgtgtggccttggattgtcctaggtctgctgtatctacacagtggaaacactatgtaaaagtgtatgatggtgtgttttccaactccacactcagggacatcccattggcttcctgaaataggccagggcgggagtgtgtacaccaaagaaattggcaaacactacaaatcagtccccactccttcagcctcagctgagagtggttgtgaaacattttactaacacactgtcactttaagctctcttgaaaccatacgcgactaccttccagatcttcctatttcaaaaaggagttctagaaaaccacaccaagtgtgcagggcggaatggggagtcagagtccctggaacagaagcctcaggagccaccgtgtcctttcccagggtcgtggccctcagctgcaggcagctctaaggcttcttcatgctgcctgcctcctgcttcccaggacattcaattacaggttatgctgtcaaacaacagcacgcattagagcaggattgctctgctgcatccccaggacctagaacagtgtcttgcacatagtaggtacagagtaaatatctattcagggaatgaacaaatcctccaaagctccctgtggttcacaacacactatattaaaaaaaaaaaaaatgccaaacatagtatctgctatacctcgtgttctagcatgagaattcatggaaggaaggaaggtggatggcggggagactactccagtataaatacaaagatataagtatacaatgtttcctttacttggccaggcattgtggctcacacctgtaatcccaggacttagggaggctgagctgcccgctcagcagatggcttgggcccgggagacaggagaccagtctggacaatacagcaagatactgtctctacaaaaacaaacaaacaaacaaaaatagaaatattagccaggcgtggtggccatttgcctgtagtctcaactagtcgaaagactgaggtgggaagatcacctgagcctgggaagctcgaggctacagtgagccatgaccatgccactgtgttccagactgggcaacagagtgagatcctgtctcggaggggaccgggggtgtaatctttttactttctgatttaaataagttatttttattgagtctggaatctattacttgcaatattgtttccatgagaaaataaagttccaagtaacagattttacaatgaagttttagaacaatgacccatttctgaattggagacatcaagcttaagtatatagtcaccatagcaactttttcaagatccagcatccttaatttaagatataagtaaaattttaaagcaaaaacaaaaagccattcaaaaaattaaataataaaaatattccataaagccataccatgaaatgcaatatagaaaattgtgactgatttttagaagacaaagccacgtttcttttcctatctttttaatgaggcacatggaggatggtttatttattccctagggagaaaccttcatcctgtacataaatgcagtataactgatatttcacacatggtatttgtataagaaacacaaatgcaaagagaagggaagaacttccagtgtgcttaagaactgagaactataaatgtttcctttagagaaatgaaaatttaaatctctcgaatctgcagtatgagacacataaagccatctgccccaagatacaatctatattcctgaagggacaacaaaactctctcattctatatgaatcttctgtatatgaattctgaattcataggcagccttccatctcaaccttgtacaaaaccctgaagcccaagaaggcacaaccttttcatgctaacagcacaacctttgtctcctgctcatgtttagaccacacctcagagaatctgccttgtgtgtgatgtgtcagattatagggaggaggcccctgggaagtgctggtgcctaaactgcagctaatttttaagtgtccacaaatgcagtgtccacatccaaggaaaacaacatttatttaacaactttcattaaaattaagccaatattatatgtattcatcagtacacatcccatccacagagaacccagaataagcagtattctttaatcttggtatgcctcgctgtaagcaaacccacatagagtcaaaacagctcatctttaacccacatacgttttttgggtgggaaggtgggacagggtctcactctgtggcccaggctggagtgcagtggcatgatcatggctccctgcagccttgaagtcctgggctcaagcagtcctccagcctcagcctcccgagtagctgagacacaggcaagcaacaccgcccctggcctatgcacattttaaagtgaagactaactgtcacaggaaccaccctattcagaaaaatatcctcacaaacatttttaaagaaaatgatatggaatgaatagaatggaacaaaataaaataggaaatatcaatgtacacttacaaagcagtaaggttgtttggggtgtgtgtgtgtgtgtgtgtgtgtgtgtgtgtgtgtgcacacacacacacgcttgcatttacccactgggctgccaagtgaaatgtattttttactctagcgtagtgattctcaatgaggggcaattttgcccccaggggacactggcagtgtgtgagacatatttggttgtcataactggggtcaatattattgacctctaaacagtataggtcagggaaactgcaaaacatcctcaatacacaggacagtcccacacaacaaagaataatccagtccaaaatgtcatttatgcagatgctgagaaaccccattataggagacaaccaaaaagttaaaggccactaactgaccctatacttcatcccatctggtgatcactcctgtagaacatatatggatttatatgtgcattgccttaagcaaaatctgataatatttacaaagtaagtgtaacagtagcctcttaatgggcattgttaaaacatggttacaaataattttcttctgattataaaatatcataggtgctcattgcagagaactgtaaaactaaaaaaaagcataaagcattgtgtcatacaattttaaaaagatggaacaaggcatcatcatttatacatcacttaccagaaaatgatacattcctgtgatctacatattgtgaataaattcactattttccagaatttttgtttaaacgtcactattttcacacaagaactttaatgataagacaattctcactcaggccatgagaacatgctcaagagttagatgttaggattgacttaaaaaattctaagatgatatgaaagtgtccaaataactcaacatttatttgcatccatgaacttggtttggatccataaggaatattctgactttttttaaaggcttttttttttccaatttaggggaaaaaaaagcaattagccagacatcagggtcccagctactcaggaggctgaggtgggaggaaccctggagcctagaaggttgaggctaccatgagccataatcgtcccactgcactctagcctgggcgtcagagcaaaaccctgtctccaaaaaataaaaattaaaaaacaaaggattttctcatgtttctatttaacataaataaaagaataacattttgcaaaatcctaaaatataagctaataaatgagaagaggactgaaaactgaaaagaagaagaaaaaaagaccaaaccatgaaaagacagaaatctacttgctgttcaccatgcatacttcaataaaccaaaacgcaacttaaagttcttgttgaacttttcttgtgcaacctgttcccaggcaaggccaatataatggaaaaccagagagtgtgaagaatggaacataagctcctctttgcttttcaaactatggaagatgtgcaactatacaacagaagaacaaactacaaagtcttaagttagaggttttgtcaaaaatatttttttaaatcacagtctaaatgttagccattatatttaaaagaaccctaattacattccaaagaaaagtgggtatgtgcactgtcactaatgagatctcagggcatgtgaataatttcagaagcagcagccagtatcctaggatgccttttgtcatcatttgcattaagctgaaattttatcagaaggccaattaatagtcaatgtaatagctttgtggaaagagcactaaattaagtatgtcaacaccatatattcggtacctgctcctgtctggcactcatcaagaaaattacattagtgaagcttaattctcacagatgatggcagatcactggcaactcacaacaagacttggttgacaattctagttatcttcaacatgtggtaaaaatcatgacgttaaaaggagctcagtttctgcagatctttcacagggagctataaaataaatttaaaaggatcctagcctaacttttctttttgaattctgcatctattaacacttaaaatttttggaaaaaaatgtttaagtgaataaaattcactagaaacataagtagtgtccacattcaaggaaaatgtttatttaacaactttcattaaaattaagccaatattataggtatatacttagatgctatcaaaatcctcaaaaatctaaatcattctatttctgaaataactaggtcattctagctctaaatttccttaataataaaaaacaattcaaatttaactgcttggggcatatggcactatataatatcaagtttgcccatcttaaatgctatttactcagggggtttaaaaagaaagggttacataatgtattggctcaaaataacacctgcctttataatacattaacccagagtttctcaaagtgtggtccctcccagtagcaccagcatcacctgggaactgttagaaatgtaaatattcaggccccatcagtcctgctgaatcagaaactctggggctggagtccagaaatctgtaataccaactcaagtttgggaaactctgtcctaaccttatagagatgacaatttgagaataaaggacaagaacaaagaaaaactacagtatctatgaagacttgctgtaccaagtgacatccataaattcattttgtttaattcttacagtaatgttaggatgtagtaactattattctcatttacactggagcacctcttgcttagtgaagttaagccatgaagcagagacactaaaaggtaatataaagcccaccactaaccactactacaagccacaggcaagaacactttctgctctcatagtacctgtattgagttcgtgcactcaataaattgccaaagaatttaggaaaaaaggggttctgtcaagacataatttcagtcttctatcacatgagcttcaaaacccaacatgcataatgctgttccctcttcaaaaaataggaagggtgttaatggctatttgattcctctttcatcagatttttatttaattacctgactcaacaataacctacaaaacccaccttacctgatctttgcaacctgatcacctgttccagcatcatgcaaatttccacaactggttcatctcaaaccaaaacttcaacattccaaatctaaagagcaaggtcagatggttaagaacttaacagataacctgggagtagagttttcaaagtaacatctccctcaaactccggtgttagggccaaacaccagcactgccccaaagcacttgtcaacagatataaacatttggacatggtatcagtaagaaatttgttgacatggacattgacagaaaaaatattataactgccttacaaaaaaatcatttaaaacacccttaaacatacagaagaggagactaattaaacaaacgactttatatcctttttttgagatggagtctcgctctgtcgcccaggctggagtgcaatggcacaatctcggctcactgcaatctccacctccctggttcaagcaattcccctgcctcagcctctagagtaactgggattacaggtacctgccacgacgcccggctaattttttttgtatttttattagagacggggtttcaccatgttggccagactggtctcgaacttctgacctcaggcaatctgcccacctcggcttccccaagtgctgggattacagatgtgagccactgcacctggcctttataaccattttaattaaaacctatgtagttattaaaatatatatccataggcatagaaaggcaaaactaggcaccaaaacattaacatagtatataaaatacttaacactgtagaattataagggatgtattttctgctttgcacttgtttttcaattgcttgcgctataagcatgtctttaacgtaaaagtatacttataataaaatgaaattagaaatacaataaataaaatatatgttgtatacttttaaaacctaacaaattaccaacatatagtaactattaatattttttaaatgatgaaaagttgtcttacattttgaagttaacactcttttttttgaagttaacagttaaaatgtggcaaattttaggccgggcacagtggctcacacctgtaatcccagcactttgggaggccgaggtgggtgaatcacaatgtcaggggttcgagaccagtctgtccaacatagtgaaaccccgcctctactaaaaatacaaaaaattagccgggcatggtggctggcacctgtaagcctagctacttgggaggctgaggtaggagaatcacttgaacccaggaggcagaggttgcagcgagccgagactgtaccactgcacaccagcccgggcaacagtgcaagactctgtctcaaaaaaaaaaaagtggaattttgttgttgtttttttttgagacccgagtctcactgtcacccgggctggcctggcaaattttaatttaaataactactgcaaaatactgaatgtactagatgaatacacttttatacaaagaaaaaaaaagcactttgcagatcatagcaattaccaatatccacctcatcaataagttccagggtttcactgggtacaaatgtatagttttaattttcattggaattaaccgaactggctttcctattatttcataaatttttttagctatttaatgtattctttaggctaaacacaatgaatgagcacattagaatttaggaccattctagaaggacccctgacagccagataaaacacagttattactgtcagaacacaaatgaaataatctgaaaagacaaggaattgtttagcccatcaaacacacaaaagcaatacttcttaaatgtttagctcactctaacaagttattttttataaactttagtttctcaatgtttgataataagaacacagaaatttgcctagaccacaacggctgatgaaacttaaacattcatgcaaatttatggattgtctgacattattgaacagttcatcaaaaagctagagggatactccctttgtcagcctgtgcccattagcaggtcaattcaatgaacattagcaattaacagcaatttacaagaggaaatacttaaaaactggattacttactgtgcttagtttcttacagacatacaagcatttaaaaatagaacactggggtttcaaaatcacatgcatagcattttttacaatacattttaaacatgaacaatataaacaatctgccagaattatgccacatcatttttccctttgggaaggctataaatgttacatataccatatgtattaaataattatgactagagataatcttagcacacataaaatatgggcatcattgccaagaactcgtcgagatttattacgttgagttatacagctcctatgctctgtaaggaaatgacatgtttaactttaacattacatagaaaggatcactgaaggcagggtagtggatagtaagtacttgggtgagttcccgataggacaggttatcactgagtgcgctttccttttcttcccatgccatgacctgacatctattgaccaagtggtgactccaattaaaatgctattgcttaatgatgacaaaaaatgcactgcacagatggaaaaaagaaaaaaacatatttcaggcaatgatgatgcttaaaaaatttaagcattaaattaaccagcaaattctggccctacgtgttgataactactgaaaaaatagcctacattatgaagtgttaacataaaaaattccccatgatgtcataaatattgttgcacatcaatgggctctaaaagctaaccagatggtgacaagcaaattatacaaaggtatggacaccttcgggccactcatcttctactgatcaagcacacagtctttccatttgatttttttaggttatagcagttaggctatacttcaaacattgtaagcaataacattaattaatccaggaaactccattttctgtaggtcacaggcaggctctttctctcttcatttgtccgtctcatttcctacagaagtttctccactgtttaaaatagtatgggcaggcgggcgtggtggctcatgcctgtaatcccaacacattgggaggctgaggcaggtgaatcacttgaggccaggagttagagactagcctgggcaatgtggcaaaaccctaactctactaaaaacacacacacacacaaaaaaaagccaggcatggtggtacatgactgtagtcccagctactcaggaggtcgaggcacaagaatcacttgaacccaggcagcagaggttgcagtgagccaagattgcaccactgcactgcagcctgggcaacagagcaagactctgtctcaaaataaaataaactaataaataaaatagcgtggtcacgtatgaaggatattttaagataacagaaaaaaaaataaaatagcatgcaattaactaccagctggcattaaaatgtcaccctaaacacagcagtcactcaatgaatgtggtttatgaacaatcttccttgacattccactctcttctgtggggaaacttgccatacttttctctgattccaaggaaaaagccaggaactaaataaaagggccaccgagaaggcagccttttattggctttagttttgcaaatactttgaacaaaaatgacattcacttcctacaagtctttctttggtctctatcacgtcccaaattcaattcctgttcagcactctaaaaaagcagtccactttcaactacttggacaggaataatccaggtatatccattcttagaccttacatcagccaggtccaaacaaatcaaacagtggctgccccagcatttccagagagtgggctgcagcaggagaacaaaactgcaaccaacaggtaactcagagctcgacagttgcatttctgtgtgtttgtagccgatattttcgcaaacagtagaaatcttgatccaatatgtttcttcatacaattgtgataacatagataattcaactactagcagtagaacttgttcccatgagaaatcctctgaaagaagagctctgtggggattatgggtatgtgtttcaacagaacttgggtggttgcctttaaagagtacccacagtacagtcttatttaattaatgtacaaaaccctattttaaataattttttcctttgaaagtcttaaattttgatggacctcatagtccaacattaaaaatatgtaaaaacattctcttatccatagtccctgttttcactttacagagatgagattctcttctcttctgaagtcctacaaagtagcccacaattcaccaacacaaggtaagaatgggatctggtttttgtttgtttgtttgtttgttttggctgctgattccattgagattctgcactttgtcaaaagttagccagtccctgcagccccaccccatccatgcagttgtattttttcatgacattgattaccagtttagtgacaaaacatttataacataccctaaaatacactcaattacacattggctagagttgtatttggaggggttttgccactatttttaaaattttcatgctactatcctcaaacaggaataaatttcattgaaacttcatttcaaactgtaaagtcaccatgtctgtctttagatgaggcatactctcccactgtctccttctgtggctgaggtggtctgtgtgtctctgagcacacagaaggtaagaaggttctgatgacagcacaagcatctaaacccttcaaaatttccaattctcctccacgaccaggcccagagagctggacaagcagaaaccatccagcatacaaatgtaagctccagtcaacaagaatcatgctgctttaatcaccaagagccttgctggaccttctcacatcctggccgactacgttaaaagaaaatctcacaggctccatgaggtgaatcacggtccactggttgattctttcacaaacatccggagcacatgaatgtgcgaggtagggctggatgcacacatgcatggtgaggaggacaccgtccttgcacgtcaccacagacaggcgggtcactgccatgtgccctccaccttttatctttgagacaggatctcactctgtcacccaggctggagtgcagtggtaggatcactgcctcaaagtcctggattccagcgatccacccacctctgcctcccaggtagctgggactacaggtgtgtaccaccacacccggctaatttttatatctgtagtagagacagggtcttgccatgttgcccaggctggtctcgaactcctaagcccaagtatcctcctggctaggcctcccaaaaagtgcttggattacaggcatgagccatctcgcctggcctaccggccacctttaatgtattggaacctttaccacctagaaaaaaaacaccttccttttgaaaaaaacattagaatgcaaaataaaaattttcaaggaaatcattgttcacagaagcttaagaaaaacaaatgttcccctcctcagggctcacttattttaagtcactccatatttggagataattaggatttccttccaacccagaaaaaaagaaatcgttgtgctcttttaactattagtttaaaaataaaacagcagaagcatgatattaaaagacttcacttcaaaaacagaatgtttttcattattttaataatctactcatttttcacctatgcattattttaaaaaaacacatctgcacaatcccaatctaaaacatcacagatacagtgtttcgtattacatatgcccttcactttcaagcacgagcaagaactccacttacgcaggtcattttaatgccataagtagtagagacattctctcatattcacccagctctcctgagtccagttacaaaaatacactaattctgtaaatgcaaaatgtatgcaaaaaaagagtaacccaaagcaaccgaaatgatcaatgaaacctcatatgaattataggacacattgcttggctatgcatagttggatatgaaagttcaaagtcacaaaattttgcacatccgtatgtcaaaggggtaagaagaaaatgctcatatcccgaagcagtgccctgttcagcccctccaggaagcagggtgggatgcagcaagcccagccaccagcatcaccagctctacctgtggactcagtcaattttaaccaacatgactgctcaaccaatccatcacaacaacttaaagtcatatacaacatacagagtcacttctttacccactgagtccatccactcactcaaatgaacacaaataacagattctaacaggccacctcagggtcaaagagcctaggagttcactgaccccacctttgattccaattgcaacagcccttgggctggaggtttatggagagggctgagaaactgccccaagcagaaagcctcctgcaccccgactcctgcctgggaccaaaactaagcgagaagaatccaggcaggggcaataacggggtgtcggcagaggcagaaggtttccccagcaattaagcataggttccagctcaggctgcggttaggccaggacgtaagggcagcgtgtgatgggcactgggggtggccatggggaaggagagaggagcaaagcctgtgttccccaaaggttctcttaaagcagagcattggatgacaccacaggtaggaggaactgtgacctcacaggagaagccaccaggattagtcaatgcattttgcagagacaaaaaaaatctcatagactggagtagcaacacagtgttactgtcactgccaaaggttgtctgtcttgaccctacacaaaaaagtactacccaagacttgaggtaaaaggaagattccacataatagtgtatgtccaaaattgtgttttaggcagtagcatctctaaaaagacctctaatcctatttcccactcagtgcttcaaaaaataaatctaacttcaaaaaaaatcatcatttattatagagacagagtctcactctgtcacccaagctggagtacagtggtaaatcacagcactgcagcctcaaacttagggctgtagcaatcctcctgcctcagcctccctagtagctaggactacaggcatgggccaccatacttggctaaatttttttatctttatgtagagatgctatgtcatccaggctggagttaaactatggcctcaagtgatcctcccacatcagcctcccaaagactgggattacagcagacagccaccacacccagcctacaaataatttaaatctaaatttatggctgggagtagtggctcacgcctgtaatcctaacactttgggaggccaaggcaggtggatcacctgaggtcaggagttccagaccagcctggtcaacatggtgaaacaccatctctactaaaaataagaaaagaaaaattagccaggcatggcggtgcacgcctgtaatctcagctattcaggaggctgaagcaggagaattggttgaacccaggaagcggaggttacagtgagctgaggcctcaccattgcactccagcctgggcaacaagaacaaaactccatctcaaaaaaaaaaaaaaatctaaatttactcttccagaatctaatttttaactactgcctatgaccatgactaattttaagtttgaagagacctttaataaacggactgaaaaaaacacttaaaatatcaaaattactatcaaaatacattggtacaaaagtaattacggtttttgcatttaaaactgtaattacttttgcaccaacctaatataacagtaacaccaactgaaactacgtcaatgccaacttgaagtgacttcgtccttagatgaagcagccacttcaaatactcaaatgccctataaaatgatgccacataatgaactaaacaacgtactatgtgattgtacttaaggacaggcacatcctgtgtgacatcctggcagagacttagcagaacggaggttaatcgccatcgatccaccaagcctgggaaatagtctcctccatggtcagcagccaggttcagagtggtggaaatcactggaaatgactacctgagtgctgtggtggttgccaaacacaattcctaggtcagaaccatggaaagggctggttaaaggaaggcttcctccccagtctctgaatctgagtgcacagagcagaacccaagaagccacacaaaaatatgtcctgggtactgtgattgccagcaatgttttagattcagagaagttaaggcctttgaaagtcttttattaataacaaacaatagaaattgcatgaccaagtggaggaataactgtaaaattagggtatgggataaataaatggcaaattctcagcaaaaccacacagagggaaaaggggataaacagatgagaaaactgtcttgctcagcacagcacatgcaaggtactggcatgttgggttctcatggaacatgctaaggagagcaaatcacaactaaagacaactcgggatgaaaacagaagcacaaaacaaaaagcaagcgtgagatacaaaagcttacatgaatcgaatgttggggttttaggagaatggtttgggtttttattttattaacccccttggatcaaattagctcaacacataaataagcaatgtttttgttcaaaagaggtctaagacacttaacccaaccttacaacactaaaaaggatgctttggaattctgctgagcagatccagtggctggcatcttgaggctctgataaggtaaatactacaaccgcctactgctgttttatgaattttactgctagactagtgatgcatttaatgcacaaatgccagcaattccaggccaggatacaaaaatttactgtggatgtgctttaagttaatgttgattccaacagtttacattccatcagctattccagtgccaattagcaccttaaaaattgtgtgtaaataattgaaaaacatgttagcaattaaaaggaggaaataattccacattaaaatcaggaagagactttaggttaaatgctaaaaggcaactgtattctcaaaacatcaggttttcacagcacaatgcaaaatgttatatgcactctaaaacaaaaatgtaacatgtagatcctgtttaaaattcagtaaatgccaattattatttactgctttcaaagctaataggttctctaattgaatataaggttttaaactttgtgcatcattaacttatattccatgttagtaatgaagtgttgacaaatgctttcaatgtattaagaatgtgaaagattctgaatgagggtagcttaagatctttctttgtaccaacttttaatgaaggccttttttaaacaacaggaaaagttaaaatgtctagcacatggttttaatacaagctttattcttaagtaatttaaaagggaggatatagatttctcataactcaaagactttaaactctatggaaaataaatctagcagttacaaataagtaatagaaatacaaagaaacttaatactagttacaattaaggccaatgacaactcagcggcctttcgttaggaatcgaaatctcacagtattggtgctcattttttaaaaaattatcaagctttaaaattggaaaaaaaattattaagatgaggaatggatatatttacattaaaatcaaatcaacttttcacaatgagacaaacagccaaaggcattcattcatgaagaaatacctagacatcgaatactaaaatactgagatgacagagtctagcatttcagaatctattacttaatcaagggtaagcagatatagtcttttaggtacagaaattcaaggggatggagggatgaatgcacagaacacagaggattttaggacagtgaaactatattgtctgatactgtaatggggtcattataaatttgtccaaacccattgaatgtacaacaccaaaagtgaaccctcacgtcagttatggactctgggtgatgatgatgtgtccatgtaggttcatcaactgtaacaaatgttccactgtggtgggggatgttgttaatgaggaggctatgcaagtttgtgggggaaagggatataaggacatttctgtaccttgcactcaattcttctgtaaacctaacattgctctaaaaaataaagtccttttttttaaggccctttgaatgttacctttaaacacatgaactacgatcccattccatctcaacagaatgatacaatcactttttacttgaaaatgatgggaagtttttcttctgttttggaattcacttagaatacaaaatcttttatactgcctgcatgggaaaatggtctcctaggaaaattttatatcataaataattgaggaacaaaacaaaacaaaagaagtacaggatcacagaataagtaatacttcaacttttgctttaaatattaggaaacattaaaccaagctggatcatgggctgtatgcttatcttttacatcattatttaattgaccttatttttcttacaccctcaatatgtattagtcttttttaatcctatgtatcttataaggtaccagtttatccaagctctggtggtaccctccattctctgggaaataccatcacccgcccacacacctacctacctaacccccatccaaaggagtgagccctggggaggcagaggtgtcctggatgactccaccctatcacccacagccacagccaccttcattgtcatcaccctgcaccacctccttctagccaccactgatgacatcagggttggaccctttgatctaagtggaaccaactagattatctctccacagaacttggaggtaggacagagagagagatctctacttgtggctagaactatgataaagaaaacttagcaacactagtcagacaaactgtaacaaggaaatagagcattaaagaaagcaactcatgggaaagaagaataaagcagaagccctgaagaaagcagaaatcagagactgaatggaggtactgctggagttctcaatgtctttctagttcttgtttcccttaactttcgatgctggttgaggttatgaagaacccggtagtaccgttacaacaacgtttttcttttctactaaagctaaattaatctggcttttgttaagtgaaacatcaagaaactcaaatgaatatagtgtaacatcctgtgtgcaagaagaatttaatagacacaactgcgctaccacccttccaattccttttcttctttctttttttttttttttgagacagagtcttgctctgtcgcccaggctagagtgcagtggcgagatctccgctcactgcaagctccgcctcccaggttcacgccattctctcgcctcagcctccagagtagctgggaatacaggcacccaccaccacgcccggctaattttttgtatttttagtggagacggggtttcaccgtgttagccaggatggtttcaatctcctgacctcgtgatccgcccgcctcagcctcccaaagtgctgggactacaagcgtgagtcaccatgcccagcccaattcctttgcttaaagaattcagatgagcgtagtgtttattattttttctgtccatgtctgttccagtcatgaacttcaagagttacctaaccctctcacataaaaccacacaaaccgtttcctttcccctagtccactctcctgtattgggctatgttctacaccctcattatgtataaagggatactcctgttcacagattttgtattgtcatacaaaacctttctagacacatagatatacctgattctaccctactcccaagccaagccaggtgagatgtcctgtcctttaaatcctaacaggtggtaaaggaaggtataactgctggggttatatgttcttcctcagccaatagctcagcaatgttcaatggacccaggggtccaccctgcagagaggaatgtcaaccatgtagctgactttctgccagataatattgactccatgatctctttttctttactcttgccaaagtgggctactcctcctgttagaatgtgtgctcatctccgagtatgttggttttgaggagaaaaataggttataaccaaccaagcgacttgacaagagggagtgtgctctattcacttttgtatcctcagtacccaacacatcatacagaatatggtatatgcctagaaaatagttatcaaacagaataactagaaaatacaaaagagccagggtcagcaaaatcccagcattttgggaggccaaggcagtaggatcgcttgagcccagcagtctgagaccagcctgggcaacacagagagagtcccatccctactgtttcgtttttttgtttttttgagatggagttcgctcttgttgctcaggccagagtgcaatggtgcaatctcggcacattgtaacctctgcctcccaggttgaagcgattctcttgtctcagcctcctgagtagctgggattacaggcgtccgccaccatgcctggctaagagggtttcaccacgttgcccaggctggtctcaaactcctgacttcaagcgatccacctgccttagcctcccaaagtgctgggattacaggcatgagccactgcacccggcctcccatctctagtgtaaaaacataaaattagctaggtgtggtggtatacatctatagtcccagctacttgggaggctaaggtgggaggactgcttgagtccaggaggttgagacttcaatgagctatgatcatgccactgcactccagccagcctgggtgacagtgtgagaccctgactcaaaaaaaaaaaaaaaagaaagaaagaaaaaagtacaaaaggtatcacaaaactgttactattctcgttatgattttgccagggctatttttcaatcaaaagatgaccacaactttggtgttgctggctgtatgtgctaagtatggctccccacactcctctacagaatacactgaacgtttctcaccatgttctcactttgcatgtggactgcacatctttttgctaaaaaaaaaaagttgaatacgtaattatattccccattgcagcaacccaaatgaatctactaccgctatttcagaggtttatgtatgatctacttattccaaaaccaatttgagtggatgctgttacaaagttttcagtagctacagttcttaataggacttctgcttcactgtattagtcatatgggattataagcaagaatcataaactatcatattgctttgatcttcagaacaattgataaaatacttatcattcttgctacctcatttcctcaaagtgttaagtcaaccatgattggggaatgagttctatctcctttctgacagcccccttgactctaattatactaaatctgcaagaggctgaagctatattattccagagaaagtgtgcctcagcttccattgccaaatatccccttcccagaaaatgtacacatttacctttactccaattattaattacataaatgcacactgccggcctggtgcggtggctcatgcctctaatcccagcactttgggaggctgaggtgggcagatcacttgaggtcaggaattcaagaccagcctggccaacatggtgaaaccccacagatctcaaaccccgtctccactaaaaatacaaaaattagctggacttcgtggcatacgcctgtaatgccagctactcaggaggctgaggcagaagaatcactttaacctgggaggcggaggttgcagtgagccaagattgcgccactgcactccagcctgggcgacagagtgagacccggtcttgtaagtaagtaagtaagtaagtaaataaataaatgctgccttcaaatccacacatttttctagaagaatcttcattagaattgaaaactcatttttcccccccacagaattagcctctaaggccttttgcactttctggagcccctatgccaaagcactgtgactttctcattcacctggacttccacaagtctctaacttaggcaccatactcagccttatatcttagttaattgcggacgtgtctcacaagagctcaatttgattgaattgatcttattggcaaagtagtatttttcattgatccaagattcaaaggcttgtaggctaattgatacaaaactgttgtgattttctaaaacccatgccttcggtggaatgtcttggcttcttatttgtaactgttaagtacctagaattagccatgcatttttaggcaggggtcataaacaaacactagagaagtgatcagagatgtttttcatttttctcctaaaaaaaaatgaaaaaaaaaaaaagaaaagaaactacaagccactaggcctttcacagtatttcctaaaggagaacctaaacactgagatgtgaattctacctgagttgcattagcagtcagaagaatagacatgccaacaaaagagaaaacaagattgctacctttttaacatcccaacacatcaagattctcgaagtgaatgcccactcatcaatgccacaatttcttccataaatcattattccagagtttaataaatggagttactcacccaacaaagagacacgcaataagtgatgaaaaggatgactcccaggacagcgatataatttgaccttacctacttgatgagaatagaagcgactgtaacaacaaaaacgcacttctgaggctttggctgttaccactcatcaaaatggagaagggcacaatgtgtgttagttaaaatgatcccgggagatgaactgagatcgttcacattatatagggcatttaaaatgagtcagtgaagagagaagcttgagagttctttttttaagccaaacattttaaaagtttgaattgaaggctgagatgggacatataattatttatctgcatcataaaaaccaataaatcttattgcacatacaatttcagaataattgaaaatattggtaaatctttggcttccgaggaaatagaaattatttctaagactcacaggagaaaccatagctaaccataattcctaaggaaggtattaaagccaaaaacaattattttgtgggaattttccttgaccttcagcttctaatgttactttactctgaattttttttcaataggttctatacaggggtgctggcatatatcaatcatatttctcaaacccaaaacagctgttcagaacaccgccgtgcagaaaaagttaacgataccatagatacttgtctaagcagacatttgtatatacatcaattctcattctaatatttgacgagttcagggggttgttacatgtgaaggacttgatgaaaagaggacacaaggccaatacagacaatgtcacaaaaaaacaaaacaatctactaagtgaaaacacatttgttttttggttcttctatgagatgcattttcacaattattttactaaatgtctgtaatattaacaacaatttctacatttgaaagttaatgtcaacagatgcaagaattttatttttaaaattccagagagacaaagccttttcaagaatgggagcctgtctcctgtaatttggggagatggggtggttccggaacagcagaaaccatggcgtgtccactgcgttcattttaagtctttttcttttgagacaatggtgttaaataaattatgatcacgttttcatgaggtgcaaaggatagctaggggaataaatgtcagcacctcatctgaatctgatgaggtatttggaactcaacatttccatgcaaaaatgtcagaactgtatttcaaactgctctcagaccttccctctgggcatgtgcgcaggtgaggactccctcaaaccactatttgggataagcttttaaagcaaaaagaaatcctggtggtaaaaacaggcagccctgctactcagcgtcaagtgtgcagttgctgacattctaatcttgagaaggggagaagggcccaggaaatattattctgaatactccaaacgtgtgatgcaaattataccgactctaatcttgaggggtgtgaggtgggaggaggaataagaaaatcaagaggtctctgaaatcctttggccaccatccccgaacctttttcttctccagggaatgaaatgactccagccttaaaatacatttttcatcatgacaattgtaaaggtgaaatgatgggaatcttatcttgttaaaggtttaccaactgctttgaatttttgctctcaatcccaaaccagtatttcatttgtcagttccagtttccatttatctttatacaaagtcatattcattaaaactgggtacagcaggaaagccatgttaaaatgtcattttccacaacagatgtcttaggaagctgtaacgcacatttatttttttttaatttatttatttttttttgagatggagtttcattctgttgcccaggctggagtgcaatggcgcgatctcggctcactgcaacctctgcctcctgggttcaagcaattctcctgccttagcctcccgagtagctgggattacaggcgtgcgccaccatgcctggctgatcttgtatttttagtagagatggggtttctccacgttggtcaggctggtctcgaactcccaatctcaggtgatccgcccacctcggcctcccaaagtgctgggattacaggcatgagccactgcgcccggccctgtaacgcacatttaaaactatcaactctcagcccagtatggtgggctgaaacctgtaatcctagcactttgggaggccaaggtgtgtggatcacttgaggtcaggggttcaagactggcctggccaacatggtgaaaccccatctctactaaaaatacaaaaaaattagctgggtatggtggcaggcgcctgtagttccagctacttggaatgctgagggagagaatcacttgaacctgggagggggggtgaaccgagatcacgccactacactccagcctgggtgacggagcctgactgtctcaaaaaaaaaaaaaaaaaaaaaaaaaaaaaggcttgttggggggtggctcatgcctataatcccggcactttgggaggctgaggcgggcggattacctgaagtcaggagtttgagaccagcctggtcaacatggtgaaaccccatctctactaaaaatacaaaaatcagctgggcgtggtggcatgtgcctgtaatccctgctactcaggaggctgaggcaggagaatcacttgaaccagggagtcagaggttgcagtgagccaagatcacacaactgcactccagcctggcgacagagtaagactctgtctcaaaaacaaaacaaacaaacaaaaaaactgtcagctcccatctaccacatttccccaccaagtggcatcagcagcaccgagctcacatgcagggttactctacaggcccaatctgcttttccatcttccaagcttcgtgtcagaaatttcatgggacaattcccacttttattttcttagtctatcatttatataaatgttaaaaacttttttttaaaaccaagcaaaacatagtgtcaaccaaatgatacaccatcattatctggagagaggagaggaagagagaaatatggcctttttaacttattaaaactgattattttaattttttttttttaattctaagtacagtgtctcactctgtcacctgggctggagtacagtggctccatcacagatgcagtacagatcactgcagcctcaaactcgtggcctcaaaccatattcccacaacagcctcccaagtagctgggactacaggcatgtgtcaccacgcctggctaatttttatattttgtagtgacaggtgtctacctttgttgcctagactggtctcaaactcccgcctttaagcaattcttcaaccttgatctcccaaagtgctgggattacaagcataagccaccccacctgaccttatttattgattttaaaaaacaaatccatttttctaattccatgaatatcagttaactctatactaaccataacactacaatcattcattcttctacatacaaccatattttgtatcatcattctttcagttactcggattataaatgtaatattttgaatgtgggcaaaaatgaatactttttttgattatctaaaagcctgaaaataaggttgaagtcacaggctgaaaagaagtatgtacatatcactgcataagagctaatgaaacatttcatgaatcctatatcccatgtttgtctgtttatttgttttaagacagagtctcgcactctcaccaggctggactgcagtggcacgatctcggctcactgcaacctccacctcccgggttcaagcgattctcctgcctcagcctcccaagtagctgtgaatataggtgcacgccaccacgcctgctaattttttttttttttttgagatggagtcttgctatgtcacccaggatggagtgcaatggtatgatattggctcagtgcaacctctgtctcctgggttcaagtgattcttctgccttagcctcctgagcagctgggattacaggcatgtgccaccaagtccagctaattttcgtatttttagtagagatgaggtttcaccatattggccaggatggtctcgatctcttgacctcgtgatccgcccgccttggcctcccaaagtgttgggattacaggtgtgagataccacaccgaatccatgtatatttaaaaagagctaattcattagaaaaaattttgctagtatgacaatataaaacaccgtgtcttgtatatataatcttttcatagataaaattcatacctgttttcaaaaataactaaggtaaatcagtgttgatgataaaataagattaatggtacatctaatatcctgacacttaatgcaaataaaaacttacatgtcataatgggaaaagcataaacctttggaggatcacatacctgctagcagttacttgttctagcaccttcgaatactgaccttctctatgcatgaaatgaagttaatttcaaccccaaagcattttttatgagaagtaaaaatgttacatgtgcatataaaatttatgtctcataaaatatcaattaaccatctcctgacagagaagtagtgtgtcatccaatgttagccttttaatttatacatgaatattgtttatataaaaaagtatatgatgcaacaagacaaggctggctaactcactatccatccaaccttccttcttcactaacagaaccctgattttatcagggatctacttttctctggttgaccaggtaactcacagtaaatttcattccatttcaggatttgcttagaaaaaggcaaaagacacaggtcttgctcacaagtcatcagcaatcttcggagggttttgagggtaggtttccagctcaggtagctggaatgtgtgtgatggagctgctgtagcctctgtgattcggaaaagagctagcgaagaggcagagaggaaagagaaagagttgggtccttgctaacattactgcattatgcagttaattcacagtcaacctattttgtgattatgcaacatacagatcctttattgtttaaatctctttcggatggattttctgttacttgcatacaagttgaatgagtagacacttaggatgttcttgttttgtgaaaatagtaaccacatttgatgatctgtctacaattgcaagccattaatataattttaatgtatgtatgaaatacaataatcaacacatctccaatgttcatgcaactcatttaattcttataacaactttacaatgtaggtacatctcttatcttcattttagagatgggtaaactgaggcccagaaaagccaagaaacttgcccaagtgcacagaactaattaacttctggagccaagatcaggcagattggctctcaagcccatactcactatgctgagcaatactgtctataaaatgaataacattaaaataactttagaccatcagtgatattaattgctggccagaaatctaagatcatctagtagccaagtatacttcatcatgaaagctagtttaattatattaagacagttcttcgtctggtcactacagaagaccagatggtcagataaaagacaaaggagcaaggctttttttttttttttttttttttttttgagacagtctcgctctgtcacccaggctggagtgcggtggcgcaatctcagctcactgcagcctctgcctcctgggttcaagcgattctcttgccttggcctctcgagtagctgggattacaggcgtgagataccacaaccagctacctttgtatttttagtagagacagggtttcaccatgttggccatactggtctcgaactcctgacctcaagtgatccgcccgcctcggcctcccaagtgctgggattagagatgtgagccaccgtacccagccgggacacttttatcttaactctgtaaataacttgctctttaacaactttgtgttcctggttcttaaaatcctcgtttttaagaagtgattttgatgcacagtgtgcctcacaccatggcttgataagctgttttatctttatggcattcacttttcagatgtggaaagacagtggccccttcccttaagatcctgtggaaattgacaacactaatcagatcaccaggttatttttgaggggaggaaagcttcaaaaaatgtggaattcaaatgatggtgataattggcttttcataatttgttccatttttcaaattcaaggaacaaaaagtcgtgattcaactgattttccattgtgtcaaaaggaaaatacacatcttcatttttcaatgattaaatacagtccagtgaactggcactgatgatccaactcaatacattccatcgatcctggagccaccccagtgataacacaggaggacggctgttcttactacatgaggtctggagctgagtcaacaatgttttgggatgggaatgaggaataatgtccggccctgttaccaccacaaccaacaaatgacattttctattttgcaagaagtattgagctattttgtctttctcagagatggacaaacaggggggcttgtgtattcctgaaagggatgtgaaaacaacaggaagcacctctgtgggacatttctatacaagtcattcaaagcatctgcaaagaggaaagccttgcagcctttcacaagcttaatcttacagcaaaacacagattttgactaattccaaaaacagattaaaacccttgaaaatgagatcacattcataacttggtcttttctgacctgcaagtgcaaagataccctgggggaaggccagctggaggctgagaggtacaatgactaaaatgcatggtaaatacattatcccggaaatgcagcctgaacagctgaccaaaaatggaaagaaggtggtgcaaaacaaaccaaaataaaaatttacctgtgtattatctccaccctcccgcaaaaaagcaggttttaaatatgtgagttttttctcttacctaaatgcacaagaaatgtgttcttttgcttttacaatagaaaatattacacaaaagccccatcatagtcttatagagttctatctagatactgactaaataaattaaccaaagttttttttacaattggcaccatccattcccacatcaggccaaataaagcacaagacactgatgtgactgctgttgaagccaatattgcttaaagataagaatatatctttaagtgttattattaacactctttttttgaatgtactattttaaagagtaaaaatgacaagaatatttctaaaatggttcaggtacttccaggatttttttaagtgtattttaagataacatttaacttctttgactatagtcacttcctctataaagacttggaaataaagtattgacaagttaagaaagactgccacataggaaacaaataacaggaaatgcactttatagctgttagtatagtgcaccactcaaagaaaacacaaggttaatgagatcttgttgagccaaccattcctaaaaggaggattgctaggtgatgtgcaatagagaaaatgatactgaacaaagtactgatatcaacatttatatttgtattatgcgatggactgattctgcatgtgttctaaaaataaatgctaatccactatacaattttttaaaaacaatgtcaaaataaatgttcacttcaaaaataatggtaaagaatggagactaacgagactattttacattaaaatattaaaatatatacatatgcatgtgtgcttaacatactgtgattaccaatattataaacatttaaaccgccaagtcatttctgaaatagttttaaaccttaagaaaagttgagtcctttggcggcattttctttttacacaggtttgacttagcatcaaacaagtagtctagtcagatttacaaccactcacgggttaaattcatccacagcacttcctacaaatccttaattaacacaaggacagagagatacaaacatcagttatgcactttgacaatttaatctaatttaaatttttcagtggcttttaaagtagtaatgacattattcatttaaacaataagataaaaataggaagatctgaaaccagcagctacagctggacgtgaagctatcaatattgtaccaagaagctttgcacaatagatgtgacatgaacaatttcaaaattatcctccagccatctgtcctcagaatcgtgagatgtaattgttgtaggctctagctagcaagcatgattagttcactacgaggaacgtgtccttgtatcctatatccaacaaaagagaatctagttttgtcaatgggataatgactgctcatgggcaggttaaggaacaaaaccaactgtcttccattcactaggcagctttcttcctgtggggtaatcgaatattctgctctctcacctctgcctcccagtgtccatctgcaaccaccctgaaccacatttgagtctgttatccacagttcttagtgaaaagggaatgagttttaggaacagccttccaaaaattgcattttatgctgctggaatatcactgaccataaaggtaaatcgaaatttaccctgctaaagttagtactacaagtgtggttgaagtttgccaccataatgatcacaggtttatattcaacaagtcatacggtgatgtttccattattggcaaatgagatatcctttaagaggacttaattcattaggattttaaatacttctgttttgaatcaaaatcttgctcgttttgaaagtttctagacaacaagaaagaaaactggtctctttgacaattttaccaaaaaaccgctacaaattttatttcatggaatttatagaaataagatataaaaatcataggggtttaatttttacaaagactacagagattatattcattttcataagaaacaaaattctgagtcttaagaataatgatttacacactcttgcagctgtggggtggcagaccatgtggcgtgacctcccctgttctcagacgcagcgatttccaagctaaagaacagagatgctgcagttaaagaagagctaaagtcctgctccagaacttgctggctgtttgacttcagggcaaattaacctctctgaacttcaatttcctcaattgtaaaaaagatgcactcaaatgttaattgctcaattcctactcttcacttttctaataatactgaatatgaaacacttcaactggtagagacttaattacattttcagtatatattattatctccaaataaaaatgttaacaaaaccatctaaaaataaacactcactaaggttattgatattcaaatctaaactcatcaaattttccaaagtcctgttcatgctaagtaaaagtattaaaaaatatttaatgccagatgaactgtattttacaaatctaagaaataactttattttccttcagaagcaaatcactgtggcactctcctgagtaagcagacagcagacaacattagccaaatacaacatgagaaaaattgtattgcattaaggttcaaacatcaacatgtggaaattgtagagaaacgcaaaatcattcaacagaataatgagggtttggggaggaaatgttcatgttaccacaggacatttactataggataatttacagtggatatttaatttgggtttgatttttaaatatttttaaattatgagggagaaattattcacaaagtaaatttgcaatgcttaaatataacactgtgttacacgtgactatatatatatatttttttggagacagagtcttgctctgttgcccaggctagagtgcagtggcatgatctcggctcactgcaagctctgcctcccgggttcatgccattctcctgcctcagcctcccgagcagctgggactacaggtgcccgccatcacacccagctaattttttgtatttttagtagagacggggtttcaccgtgttagccaggatgatctccatctcctgatctcgtgatccgcccgcctccgcctgccaaagtgctgggattacaggcgtgagccaccgtgcccggcacctactagtgactaattttattaaaaagtggacataagtcagcatgactaaaggatatcaaaacttatttttgaaaaaatctaacctcaggaaaaaaacgctaaagtcattcacaatgaagattaaagaatgaagattaaatgaccattagttatgcaagatttttcttcctactcaagcaaaaaaaaaaaaaacagattacattataaatatttctcattttgttattaaaagctgtatataaagaataggtgattccaatgttatcgtaagacttttttatttccctcaaacagagacaaatattaggctcagacaaaattttctcaaaatagaaaacttaacatagtacatctatctaatcctataataagtaaagaagttttagttttgaattataaaagttgcttactctcccagttctggccaaaatactcaaatacatatatttcaatttctacccattgttggagttattttttcaatgcgatacagcaaactctgtggttttccaactgtgcttggcaatgtgtgtcttcttacttctgaaggttggggtaccaaggacttttcaggaaaaatcaagatgtatagactgtttttgtttccattgagaattctaatagttaattattgagttccaaattgtgagaggcacactaatatattcttactagatgaagttaaaattgccactcccctttggatattaaaatgttcaattctgggattccatgaaagataacacagaatagacttttcaaaattttttaccctaatgctgcagtgagccaactgagttgccaaattcaaactgccaagtgggacttaggagctgtggcctggtcccctccaatttagactaaagtttcgatgccttgggaatctgggtgctcttaaaaatcacggagaactccagagagcttttgttcatgtgggtgaaatccatgaatactacatatcagaaaccgaaaaataaaattttagaaaaacaatagaaaagcacatattgtcacaaacacactgtcagacagatgacaccccagcacatgaagcagctacaaggaaaatgcactgtacactcaggagggaacaggagttaaaagataaatgacagcattattatgaaaatacttgtgacctcagtaaatcctaaaagggtcctgaggatcccaggtgtccctagaccacattcttgtaagtgtcaagtgttctgatcatcaggcatataaaactactctcctgcaacaacatgtggaaggggcagaactacacatatcaagcacctatggtcctatctacagaaatgtttcgactgggcgtagtaactcatgcctggaatcccaactttgggaggctgaggagggaaggattgcttgaggccaggagtgcaaggccagcctgggcaacatagcaagaccctatctctacaaaaaattgtaaaaattagctgggggtagtagtgcacacacctgtagtcttagctactcaggaggctgaggctggaggattacttgagcccaggaagtcacaactgtggggagctatgatcacctcactgcactccagcctaggtgacagaggaagaccccgtcttaaaaacaacaagacaaaacaaaaaaagtatcttaattgataaaattttggcaaagattttatatttagaataaacttcttcttatgctgctgatgatagtaaaaggatgatgatgataagagcagctaacattgacatgcattgttctatgtctgttacatatatcactcatttgggctttacaatcctgtgaggaggattaaccattgcaaatcagatactataaaacataaagtcacaaggcttcctcttcagcatggtgtagcaaaactagcaataattctaaatgtaaaaaatcttatatatttgggaaataaagcaaacgacacaccaaagaattataaaccaaagaacagatggaatggaaacttttgttgaagaatgcaatgactgattcaattaagaatgctaatatacctagtaaggttgaaccaacaagtcaagttttgggaacactgagttgtgaaattactcttttatttaaatgcaggtattaatatctgtaccaatttgatgttgcaccgctttcacaaggttagctatccagataaacaaaaccatttgttttttgaaaaaagttacctaacaagcaaaaataatgttggactctagatttagtgggagaatacaaatattattatgctctatctggtaagaaattatttgcctttgcgttacccaagcaactagaatttctacaaaaaaagacatttttcaaattgtcataaatatgaacatttggaactatgaattactagatcaagcaactattaactctaaataccttctacaaattcttttgtatcttgaaaatattactgatgctataaggaagaaaaagatttgtctcactaacaaaactaaccaagacagaaattattccaagattgtgacttgaaaaaagcacaatgaggctggggaagtggctcacacctgaaatcccagcactttaggaggctgacatggggggatcacttcagcttaggagtttgagaccagtatgggcaacacagtgagaccctgtctcattaaaacctaaagaggtgcagacacgatggctcacacctgtaatcccagcactctgggaggccgaggcaagcggatcactctgaggtcaggagtttaagaccagcctggccaacatggtaaaaccctgtctctaccaaaaatacaaaaattagccaggtgtggtgggtgcgcctgcagtcccagctactcaggaggctgagagggaggagaattgcttgaacctgggaggcagcagttgcggtaagccgagatcatatcactgcactccagccggggtgacagagcaagactctgtctcaaaaaaaaaaaaaaaaacttaaagaggaaaaagcacactgagctcagatgaaccattaagtagtgactaagttaatttttgactgatcagcatcaaaactaacgggggttttgttgctcttcatctgtcatctcttacgcaggccatatggcctgattttttttttctttctaaagctatagataaaacataacaactagctgtggtattaaaagtgataatgcaattgtgaaacctaataatgaattttaacataaaatccatttcggtggcagaattttttaaataatatcttattttctatttgtatcctaaaaaggtctcaacgttgtctaccttacatattttctaggggacactgcatacacagatactccaaattttgaagatttaaaatagcatctgtacttaatatcaagaatttcaaggataagtcaggtgatggctcacatctgtaatgccagcactttgggaggccaaagtgggaggatcccttgaggccaggagttcaagatcagcctgggcaacatagcgagaggccccatctctacaaaaaagttcaaaaattagccaggtgtgatggcacatgtctgtagtcccagctactcaagaggctgaggttggaggatcacctgagcccaggaggttgaggctgtagtgaaccatgatcacaccactgcactccagcctaggcaacagagtaagaccctgtctcttaaaaataggtaagaatttcaagaatgtattacagtcttcgctaagtaagaatacacagaatcgagcaggtgcagtggctcatgcctgtaatcctagcactttgggaggccaaggtgggtggattgcctgagctcagcagttcaagatcagcctgggcaacatggtaaaacaccatctctaccaaaagacaaaaaataaaattaaccaggcctggcggcaggcacctgtagtaccaactactaaggaggctgaggcagaagaattgcttgaacctgggaggcagaggttgcagtaagccgagatcatgccactgcactccagcctgggtgagagaacgagactccgtctcaaaaacaaacaaacaaacaaacaaacaaaaacacacacacacacacacacacacacacacacacacacacacacacacagagaatcagcctccaagtaccgaactatacttgcttcatgcacacactcttcatacaatgccactgtgaagtattcaaccaagagtttgtcaagaggagctctgccacccagtgggaggtgttttgacattgtgaaggcatttgtttccagtttagtcatgcttgagcatttatatattggattgatatttttattataagttatgccctttgtatttatcttttgagagcaaattagcctataatacaatacatcctataatgttaatattataaattaatatagtatattctataagaattcaggtactttcttttttctatttacttattattcatttatttgtattttcagttaggttatattttctaagaattttattgtaggataccaaaagatttacaaaatattgattataaaaaggggacactggacttatgggttaaaaatcattactttaaacaatcaaaagcaaatgattttaattatcttaattgtgccaatccttcccaaactcctcccttgaattcacagtttcactgacagacatatctagtctctcagcattctgatctgaccatcaccaaatttagacacttgtccataattcctgtgtcctccaggcctctgaacaagcaatatagcaggattcactcctcagtgctcctgctaccaagaggagcatggaaatcctccacattcaccaggaatcaaagacatatgcaaaatccaaagttacatgactccaaaatagtgacccatcccagtgcatacgcctgaaaatcatcaaaaacggctttcaggcctcactcaggcagtttagtttcctcaaatgaaaaatgagggagttaagcccaattcactcttctatgggctttattaaagtatgactcaagtatttacggcagtgttccctttagacagagaaccacggaaccaagatataggagctccttctccctgtccctcaaaaaatactcttgggaaagaacaatcataagcctggaggtcctctaagcactttggaataagaaacattttcaaaattgtcagcaaaaactaagttcctaagcagccatgcagaaatatctgctattctggcactacttgcactaataattttatccagaacagtttccacaggagtctttattatgaacacattcataaagtagaaaagattactgaaatggttctcctcccctcccctgctccccccttaaagagacagggtcctactccgtcacccaggctggactgcagtggcccaatcatagctcatgcctgggctcaagcaatcctcctgcctcaacctcccaaagtgctgggattacaaacataagccatcatgcctggccttaaatgtactgtttcttaatgaaagtaaaacaaaattctgagaatgcacaaattcttaaaccagattcaacatcccagaatttttatcgtattatatcttatgtgaggcttaatattacatgataatgcattattcataattaagaccagtgactattaatttttaagtcatcttatttaaaggaaattgagatttcaacaccaaattttaatttgattttaaactcttgggacataatcacaagggagtaggctttatctattttcctcaaattggaaaaatttggtagacacagaaataatttggctcctatctcctatttctgcacataaagagcacaccccttaggatagggttagcttctgtgtaataagaaaccccaggcctgacacatgaactcatatttcatatctcctaagttacaggagcagcactttccagtgacacttgtagaaaattgggtatttggccgggagcggtggctcatgcctgtaatcccagcactttgggaggccaaggtgggcagatcacctaaggtcaggagttcgagaccagcctggccaacatcgtgaaaccccatctctattaaaaatacaaaagttagctggacatggtggcgggtgcctgtaatcccagctactcaggaggctgaggcaggagaattgcttgaacctggaaggtagaggttgcagtgagccaagatcacaccattgcactccagcctgggtgtcaagagtgaaactccgtctcaaaaaaaaagaaaaagaaagaaagaaaatcaggtatttgagctcttctctgtaggttctaactgagatgcaccaggcataggcttagccatctttcttttctactgactcataagaacgagtcagggaaatgtgtgttgcttcttcaagctctgcaggcaatggttatgtgcagtcttgaatgaataagcagcagaatcactgatgtttgccagagaagtacagggtaagccctcccccacaaagtctcaatctattactttcaatgggaatccatgataaagtataacaaaagacactatgcttaaatatacacatccacttagatgctgtggaggacaaaatcctaaacaacataatacagttcgcttgcctctggcctctcttcctcaccccaattctcgccatcccgaccttccagaggggctgtctgcttgcttgtgcattctctcatcagcaatgtttgtttcaccttttaaaagttgttaatagccaaatcaaggaatctttaaaaataaatacaagtcaaattaaatcacccatagaaacacactgcactctttacatgttaaggcaagaaatttttgaagaagatgatctgaaaagaacagggacaaaagaaaaaaaaaagacaaaagctttttttggaccatataaaattataggtaagcagataacagctggtttccatttcacccctctgcccacccctaatttagtgtgtcaccccctgactgcactaatcagaactctattgaaggagatgactgtgtgaatttactgggaactaaagaaatcactacagaaacagtctccaacccaaagataatcctgtaagctgaccagtgtcaagatctgaatataaaacatacaaaaccaaatttagatacctctatgatatttttagttacagtggaatgaacatgtcactgtatagcttctctgcatctaatgcataaaaatgaaaggaaatctggttttcaacatcacactcccactaaaacaacttgcaatcaattaacgtcatcagcagtaaaactcaattttctcccctgcgtgtgggggtgaacatacagcacagattgataattcccgttgagagtgtggctaagtgtttctaagcaaccttgctccatcatcttctctgacaaaaacaagggaaagggtttgaactgcaggctgatggagctctgaatactaatgactaggcaaagaggaatggttcattactgacttcaggcagaaaaacaaaggagcagcttcgagctgtaaataaattctaattaaaacttagcctgcatttcatatacctgaactcaagcctacatatgaagttccctcagtgactgtccattcatgtgagatgaactcattaatacacctgcagagttttagcaaatgatgcatgtgtgttttctgaaattgcttggggaaaaaaatcttccaaatatgtccatttatatgctgtagaatttgcttaatcctcttaggaacatttaaaccgacaacattcttaaattagcatctctgcccaagagaccttgcaccgaagcacaagcactgagctgcatgatggccccaaatcaaaatttagaaatgtttcaaaccgctggacactcagctgaaggcaacacagcatagcagaatgaatccgatttgaatgagaatcgataatgtgtctctgttcacacacctttccttctgtctaaatccatcattctatcactatcgtaaaatgagcaccatatggctcatctcctgtctgtaaaatggggatgaaaaaaaatttcatcactaactccacatgactactagaatatgtgtggaagtgtgcacgtgtgcacaggcacacacgtgggtacatagatggattctttaaattttaagatgagggctttatgctgaccaggcatagaaattctttatttaatgcattagtcaatgctagaataaactttttttttttttttaaacagacaggggtctcactctgtcaaccaagctggagggcaggggcacaatcagagctcgctgcagcttcaaactcctgggctcatgcgatcctcctgcctcggcctcctgagtagctgggactacaggaacatgccagcacacctcactacatgcggctatgtttttttgttttctgttgctctttttttttttcttttttcctttgtagagacagtgtctcagtatgaactcctggcctcaagcaatcctgctgcttcagcctccccaaagtgctgagattagaggctaagataagctttttaaaaatgtgatacctccttacaatattccaaccaaaacacagcaaaacttcgtgctgaaaaaaatttttttaagttttttacctgaatcatcacatactgccatccttaagcccatttatgcctagtgttccattactggaacaccaagcatgcgagcgttgtttatatcctactgctcaaagtcattgtcaaggtctgattttcaaaattcacaaaattgcaacctcaggcataaatgggttagaacatgccatttttcttaaataagaaagtattcccataccaatgagcaacagaattgtcaaagaataagttttaaaatagcaagagcaactaatatttattgagaacatagtatatgccaagcaccacagttgtaatttccacacattagctcattttaacctgacaactcagaggtgagttctattagcccattttacatatgaagaaactgaagctgtaggtggtcaaacatcaagtactttgtggagctagaattcaaacccaagctcccttctacagaggccactgagcccttaccaagctatattcagtgtttccaacttctcaaatacactcaatcgctgagggaacacattacctacttgtctaacagtgagttaactaccagtccttgaattatacatactaactagacttttatgtggctgaaatttttaatttcttcttttataattagttcaggttgaatttataccacttataggtagaggtgttgaggaagatggaggggagctagatagcctaagcatataccttttcaagatatctgcttattcaaagagaaaattataaggctgcgcgcagtagctcattcctgtaatcccagcacttgggagaccaaggagggtggatcacagagtcaggagttcaagaccagcctgtccaacatggtgaaaccccatctctactaaaaatgcaaaacttagacgggcatggtggcgtgcgcctgtaatcccagctactcaggaggctgaggcaggagaatcgctttaacccaggaggcagaggttgcagtgagccaagatcgcgccactgcgctccagcctgggcaacagagtgagactggtctcaaaaaaaaaaaaaagaaaaagaaaattattaaaccagtgtagcagcatccttttcaataaaccccagcgcctctaagcactaccttgcgtgaggatgtgcacctctggctctgctgtcaggtgagcccttccgtaacgccccctgcccctcccaggtgccctagatgaacttagtttcctcactcatgaatgggcatttggttaaaatcaatgaaaaaaaatacgtaagaagcctagttcactgtcagacaacgtgaactaaataaataaaagctaccattttctctgtgtgtgtgtgtgtgtgtgtgtgtgtgtgtgtgtgtgtgttttgacacggagtttcacactgtctcccaggctggagtgcagtggcatgattttggctcactgcaacctccgcctcccaggttcaagcaattctcctgcctcagcctcctgagtagctgggattacagacgtgcaccaccacgcctggctaattgttgtattcttgagactgggtttcaccatgttggtcaggctggtctcgaactcctgacctcttgatccacccactctccaactcctgaccttgtgatccgcctgcctcggcctcccaaagtgctgggattacagcctagagctaccattttcactacagaaaaaaaaaaaaatagtttttgagatggagtcttactctgtctcccaggctggagtgcagtggtgcaatctcagctcactgaggttcatccacctcctgagttcaagcaattctcctgtctcagcctcctgtgtaactgggattacaggtatgtaccaccatgcctggataattctttatatttttagtagagatgaggtttcaccatgttggtcaggctagtctcaaactcctgacctcaggtgatccaccaacctcagcctcccaaagtgctgagattataaacgtgagccactgtgcccagccagaaaagcattttaaattttccaattacagcatgcttggccaggcacagtagttcatgcctgcaatcccagcattttgggaggccaaagcaggtagatcactcgagaccagcctaggcaacatgacgaatccccgtctctagaaaaaaaaaataaaaagtaaatacaaaaattagccaggcatggtggcacgtgcctgtggtcccagctactcgggaggctgaggtgggagggtcactggagcctaagaagtccaggttgcaatgagctataatctcaccattgcagtccagctaggtgacagagcgagatcctgtcattcattcattcataaacaaataaatcaagcttgattgaatcccaaaaagcattttaatatgtttacagaaaactgtaagttatctattaaccatagtttttactaatcctggctgtgggccataaaacatttgccaaaaatttggtatcatctcccacatttaaatttttaagcttgaaactgtgatcaagcttggtcacgtaaagatttccaccataacttaaagagtaaccacagattacaatagcagggccacttagagacacaacgtattattcaccacaacttccaaaacttcagaacaatgacagctgctcacacaaggaaatgtgtactatttgaactggcaagatttttagctgactcataaggtatgtccttcaatcctccttgtctgacttacatggtctaacacattaatcatttaatttctaaaagaaaatataaaacatgatcagtgtgtgaagtgatattgttttctttcccccaacgaaatacaggtatcaagctaaaaattagcttaagtacttgaactcatcgtaagtagccaatgttaaacatatcttgatttagattcctttaaaagctcataattattgcactgtttaaatacagcatctttaaatataaattaatatttatttgggattcttgggaaatttgttctagaaatttattttggttatttttctttttcttttcttttttttttttttttttgagacggagtttcactctgtcacccaggctggagtgcagtggcacgatctcggctcactgcaacctccaccctccaggttcaaatgattctccttcctcagcctcctgagtagctgggactacaggcacctgccactgcgcccggctaattttttgtatttttagtagagctggggtttcaccatcttggccaggctggtcttgaactcctgacctcgtgatctacccacctcggcctcccaaagtgctgggattacaggcgtgagccaccgcgcccggcctatttaggttatttttcaaagatttttgttaaaaaccattgcacagagttatagaattttggaagtgaaaggaaacagtattttaactcaagcccttgtctgaaatgtgaagatactaatgcctcaagagacacatccatttgcctgactcctacactgcaaatctagaaccaaaatccaagtctttgagaacccaggacttgtcatctcttggtgtagagttgaaccacagtgctggaggggctgtgagaggcagtctgggaaagaagggatttcattcgtggtggatgagaaacagaatctcacaataacgatattatgggcaatccctcttgtgtctaaaaactactatttaacatgcttgacaactgaaacacgcatgagttgatttattggctaactaaaggcattcttcacaacacagcaagctgttttcacattagctctacaactaaaggaatgttaagaataggaagctgatattaactatttaaaaatttacgccaagaaccaaagaattccccggcagaaacataaagacttgctgaagtttcatcatgtgaatttattgccaattcagtcatcttaaaagttgtgctataaaacatattgtcctttgctgttccaaataacatttgaaataaataataactttcttgacagtgtttctggaattttcttccattctccaaagccaattcttagacccttaaagaaatgatgagctggcattttgcccatcattctctaggcaattactggttccagtaatgaataagggggaaaagaattcacatagaaagctattctagcaccacactgcttatatttcctcctgaagactttagagataatgtgaaaattaaagacagtacagaaacccagtgttaggataactggttagaaaatgactcatgggaacaaatatgctcaccaatatcctcttgtagccacttgtccacaaatcacttcaggtatcgcttttattggtctaaatgaataaagcagttcctcttatatatatctccacataaagaataattggtcacaaaatcataaccattataaaccaattggtacagcccccaaagccatgaactggttgaactgaagcattctcactattgatgtgttatgcgctatatgtgacacagactaagcagtgcctacaccaacatccactgttctagtcctccttcataaggaaattctgtgttaagctaggcagtcatgtgctcaccttgcagtaagctgttttcgcatgagctttaagaagttaaagacaagaatgctaattgtacctcacaaaagcatcctaaaagggaaaccaggtgcccttcttctttcttcctttctgctgcctggaatatcagcctgatggctgaagctcaggcagctaccctgaaccatgaggtgatactgctaagaatgatacttcggggagacaagtgtctggttctctgacactggggttgtcaatacataccagacctggactgccaactgcttgacttctttcacataagagagaaacaaactcttagcatgtttaagctgttattattgtgagtacctgggattaaatgtggtggtatataaccccaactaataaagtaaaaaatttaccaaaatgcaccaacaaatactgaataaatataacaaatgacacgatataaccatctaagtttttggtttaatgccatgaaatttaaatcaaatttagatatatgccagtaaaacaacaaaacaccaggaagaaaaaacaaagttgtccttaaaaatggacatctaagtgttctattcacaaaaataggctgtcaagatagctgctactctaagtgttaggatcagaaagatacatgtgctccctgcttttattagtatctctgggttttaatttttgtctttttgatttttttttaatttttgcctttggaaaaataagtgagactgctagtcaaaccacttcaagtgtcacttttatttttagaatcactatcccttatttacctctgccttctttaatgttccatcaatcagtccagccttctaaattgaggaaatgaggcccaatcaatctgcctttacacagagttaagaaacagacattaaaaaacagaatgaggaaaccttatcttccagaggttactgcacagatgaaataagagaatatatgtgaatctactttgtaaacactaaagtacaatataaatgacattagtattgatcttatgttaaagtaagaaaagaaaacagaccattttccctaccggaagcagaatgttctttacaattttctatcagtttaatgctccaatttttttttcctacaaaattgaagattaaaaaaaatcagtgcaaattaggaactaattttaattacttcatctccatctatttaattcatatctatgatgctaccaattctagatattttattagagcctttggtatacataaatcatcatttattagagcgtaacaaatttttagtatcacttagattatacgtgatacacaaatgtgaagatacaaggatgcctggcatgccctactgatttttcaagctattgttttcccaactattatttcttcctagcctaaactagacatgaatttgttgacatgagactctttaacaaaagggcaacccaccattattgctttagagactgaaaccttaccttcctctttgtccatgtagacctatcccttactgcttcctaaaatgaggaatgaatcactgatgttgtctcagaatattacaatgctaaagtctttctagtgtagtaaggaggaaagagttatgcacttggcagaaagacctaggactttcagttccactttggccatggattctctgtaaggcatttgttaggatattgcaacatctctaaggttaagccaaaacatatgtaaaacagaaaaaatgcttttagtaaagtgcattcagatgctagtttcttggccccatttcatctcttctcaagctcctgtgtacagtaccttgaaaaagagaggtacatggtgtccaactaatcgagcggagtttcctaataattcacatgaaaacaaacgttacctgactcaatcaatttttaagcgtctctgtgatgtttgtctattatttttcagttgagagacaaacctttttttgaaaacttccattactgcagaagttcctggtttgcccaatcataatgccatctaatgatggctgtcaattaagctaactgggcagacaaaaaaataggctagtcacccaagattactgtttgatatgttttcgttacatggaataaaacactttaggctcattaggttttcccaggctcattaggtcttcccctctcttgttcctagggatttatccatccccagaaacattagttagctttttgcaaagacttttttttcatcttttgccattttattaaacttgcatgtttgaccctactgcttcattctcagtaacactcataaaaaacaaaaagaaaacacctcattcatgatcatctgtagatttaatatattgcttagctaattcttctagatcattaaaagaaaagatacacattatcctgtggttctcttcaacttgatatgttttcaattgccactaactcttggacagtttattacacacttgacatttctttatccaattcggttagtttggtgaataagatttcaaaaaatcacttactcgaaaatcgtgatatttaacatctatagcctttttaaaattaagtaattccatagagctatcaaggaaagcaatcaggtttttgtatgatgattactacttaaaatgctttagtcctgcacccattaacttacagatgtttacacattcttgttaatgtttatttcatcaatctattaggaactgaaattaaactaacaatgttaatttaaaaaaaatctgctaaacttcacctgctaattctttactatttctagtactaaggctcaccactttttctaatttttctttttttttctttttctttctttttttttttggcaaaactctggaaatctacagatagtaccatctctgtgcacagaaagtgaaaattgtggtgtgcgggtgtcatttcagaggttacttagcatacctacttcctatcattcaaatcactctgtctgcactgcttatagtcttgaaggcttctgccttttgtaaaatcccataacattaatttatatacttttgctaaaggcttagaaaactgaaaagtatgtaaaatgagaggaaggtatatctgcatttgcttatataaacataaactatctctagaagaacacacacaacagacacacccactaacaacactgcctcctgagaaggaaactgaatggctcggatatggtgtcatcaattacatattttgaattttaaaccacatgtgaatgctccacttattcaaaaaatgcaggttattccagacctgagaatcagaatcctccacaagatttttatcagtaatttaaaaaaattaccttcccaaatcctgtaacattcaaatatccatgagaaaaaaaaaagtaagtcatatcaagtaacaactgctactttaatgcagattagttttcagtcccaactgatggatatggaaatccctgaaaataaagatacgggtggataaggtaaaaagaaccaagaatataaaagaagtaacgaccctatggaaacctaattatgttctttgaaataattacttgattaaaggaattcaggatcaagaatttgaataagcaccaagaggcaatctagtaggataagtaggaatagacctcagaccattttcatcataccttgtaactgaaaaaacatttctgtgacttccataagggaacctgcagagctctcataatgtaaagggaggggaaggggcagagaaatggagataggtctaaagatgtatgactgagcacatcagtgtctgtgtttttatacagatcaaatccaccttattcatcactgagccataagaacactatagggggaaaaaatatactctgacagcctttggcactgtaaaatgcataatgattaaagaaaattttgtttctagccatatttgaaaaatatttgctagatgattctaagcattaaggcactcatggccaggcgcagtggctcaggcctgtaatcccaacactttgggaggccgaggcgagttggatcacctgaggttaggagtttgagaccagccctccagcctgggcagagaaaccctgtccctactaaaaataaaaattagccgggcatagtggcacatgcctgtaatcccagctactcaggaggctgaggcaggagaatcgcttgaacccaggaggcagaggttgcggtgagctgagatggtgccattgcactccagcctgggcaacaagagcaaaactccatctccgaaaaaaagaaggcactcatgtaggggtgatacgggacaaactcatttttctagtccagtcaactgggaccacagccccaaaattgacatcctaatgcccagcatgggtagacatggtaaattaagcagaatgaaaatataagccactgaggctaatgtttattttttttattgtgtttttttgtttgcttgagacagagtctccctctgtcacccaggctggagggcagtgacacaatctcgactcactacaacctccacctcccgagttcaagcaatctcctgtctcagcctcctgtgtggctgggattacaggcgcctgccagcacacctggctaatttttatatttttagtagagatggggtttcaccatcttggccagtctggtctcaaactccttggcctcccaaagtgctgggattacaggtgtcagccaccgtgcaaagcctgacccatgagttttataatcttgtattatgatgatgatgattgttcccctctgaaaaatgcaatgaatgttgctcccagagttaaataccaccattaaaaagcaggcacagtgctacctcaaggacaaaggagaatcatcatcattgggcagaggaattcatgtgtcataccctagattcctttgaaactttgcaaaagaagggcaagttatatattataatcactgtggtgttggtggtgatattctgtgttttagacaccaagatatctacagtctcaggagcaacttgctttagctatgtctcctgcatgctaatgctcctccatgctctgagtttcgtgcaagtactatgtaaaaccatgactagttagaagtataaggatttcatcactggccaataaaagccatcatcttacaaatcattgcggataagtgccctgagataatttccatcagcactcccacacagctcagggctggctccgtgggtggaatcacccgtatactcacacaggggccacaataggtgtcttgctctgcggtgaccagttcaaaattctgaatcacttttaaacaatagactcgcattttcattctgcattactaagatgaagcagggacccctcttacgggcctaacctccaccccttccaggcatggaagtaaagaaaaagcttgagttcatatgagggaaatgccaggcaccttgctagccctgagaagtaaatgagcaatttgataagaaggtaacagttgcttaaaacagtagccaacaaagttagagtcatgagatgttttgttctcaacagaaatgtaagataacatcttagcatatgtcctgtttttcagaaacctggacccctactaaacagacctgctggcacgcagagctcaggtgagagaaaactgagggcgggcctctgacagctcttcttgttctttgctgtaaagtctatctgaggtgatacaagccacagctaacattcttttctggtgaccccaaatatttaaacaaagcttctcttccttaaccaactgcaaatctgaaaattttaaaatctacctatcacgtttaatcacccggcgcttcaagaaagcccacctgtataggtcaaaaccatgtacaacctccatgtatgaatttattaccatacctgtgacctctgcctccttgcctttaaaaatccctacctgtaagccatcagggagttggggttttaaacatgggctgcccgattctccttgcttggggccacgcaataaatgtctcactttctcttgctgcaatcccgttagtgtttggctttgctacactgagtggttctgaaacactgaacctgcaaattgtgcagccactcctgactctattcctcaagctatggtctgagggctggcagcatcagtatcagctggagaacatgctagaaatgcatgatctcaagttccacccaagacctactgaatcaagatctgtaggacattaatataacctcaaagtctgaggggtactgctctattgagaatagttctacattaaaatacaaagtagcacaggctccatggctcatgcctataatcccagtactttgggaggccaagacagaaggttcatttggtccagcctggacagcatagtgataccctgtctctctctctttctactatgtatacatagagagagagagacatagaagatatgtggaagatacatgacaaatggtccaaaactcaaccagcctgtgagattacatagtaatgagtagaagtgaaatattttgctctataaaaatcaatgtaagaacttggttaaacagagccagagtgtacccttaaattcatttatcaagagctccccacaatcacttaaaaaagtgtagtactattataggttgaactgtatcccccaaaatgtcacgttgaagtcctaacacccagtacctcagaatatgactgtatttggaaatagtctttagaaaagaaattaagttaaaatgaggtcattagagtgggccctaatccaatatgactggcatccttagaagaagaaaaaatttggacacagacgcacacagcaggagaactccatgtgaacataaaaatgaccatctgccgacactttgatcttggacttccagcctccagagctgtgagaaaataaatttctgttgtttaagccacctagtctgtggcactttcttatggcatcccagcaaaactaatataagtacatgtccaaaaaaaaaaaaaaaaaaaaaaccaagcatgtcaaaatatagtttcttccttttttggacaacatccatgaactcattgtatcttgttaatcctgaattcacagttttactggggggctggggtgggtgggtggggggctgttaatcaagtgttgcatttttagaattctccaaatggccttacatcagaatactcaagtgattccatgtacagaagtcatatgtatcagtaacagacagtatttattcataatttctactgctacgcacactagaacttgcatgctaacaggaagcagagaatgacatggacatcatctgtagtgatccacaacctccatttttggtatttatacaaagatggtgaacattaccaatccaggatcatttcatacacttatttccatgaaatgccaattgccagtctcactctgggtcttcctaacacgaatatgatgacaccttctatgaaaaaccatctcagcaggacgtccttctcaaggctcttctctttcactgcaaatgggcagtggaaggctgttcaccaaccactcttcaaatctaatttaaaattagtgctaaaggaggggcaggactcacaacgtccccctgatgccctgccggccagcccacaccaacgtccactcaaagaatccttaaaattgcaacaaatcaaatgtgacttgcatctaattgcttttcagaatatatgaggaattgttgcctgaatgccttctccttttgttttcccctacttcccaacttttcccttggagggaaaggacagagaaaagacataagcattcactgaaaactgtaatactgtataatccatagttgattgcattttcattgattcatagtaaaattgttacttattattttaaaactgggagtgggcagagtggttggaaattcagctaaagaacagcaagggaaacaccagcttttgatttttgtgttagccaaaggagaggtcacgttcaaaggtgccttgccactctcttctcgctgtcagctaaggatccctgtccaacaatgatcacacttagggcatccttcctggtgtataaagaatccttcctgaaatggttcctaaaagaagaactggaagtgggcacacccagagtctagatttgtcttttaggacttctatggaaatcctgattctttaaaatgcacaagagaaacctcataaacgctgtgtccacaagcagctgcatgagacaggcactggaggcaaagcacccaaatgctggaaaaaatctctctctgtccttactatggccatttattaactcccccgcctttccttcctcagccactaccaaccccattgacaccttgaaatgcctccttctggcacagatacaggtctgcaatggcaggactaccaggaaacagggcgggaagtaacaggggaaaacacacctgcacaccattctgtcccaacccagagggccccagtcccagtcacgaagaccagcttgttcccagaccccccatcaccccctccccatcccactccacatcgttcatccacctctggtaatggaataccaatttgtgagcctggacctgcttgccaataataaataaatcttactttatctctgtgtgtgcccaaacaaagggtctccattacccagctctcagtaagtgtttataattagtaaatatggtctttctgtttttctattacatttaagtggggctgggtaaggaaaacagatacaggaaatgaggccaaggtgtctttacccattcattctctcattcaaccaacatctgagtttctaccacatgtcgaacattctaaacactggctacagcagtgagccagacaaagaccttactcacatgagctcacattacactaataaggtaatatcatatagtaaagtaagaattaaaataggaggatgtgatggagcatgacttgtcgatcaggggagacttttctgagcatcaagactgaagacaaacccaagataaagaggagcccacctaaaatcaggggacgagaattcccagtggggaaacagaatgcaaggccttaatccagaaatgaagtcgctggtctcaaggagcaaaaagaaactccgtatgaccattgtgttggtgggtatggtacaactggtgcaagctaagccgggggagtttcgatcaaggttaggagtttctgtactcattgttactacacttaaaacctaaacatgccagcttctgggatgagccaacacaatcatgattatcacgccctgtcctctatgcagctgcaggcctaaggtacgatggatggtaacagcagaaagccacaagggagattagcaacgacttgaaacacagacagggatttagaacacactccagtaaacgccaccattccaaagttcttcacttctagattccaaaatttctttcctaaaccttcagtcctgacacagacccaaactttaggcgctcctaactaaccatcaactttaattatttatccttaattcaagcctccacaacataggcacaactttcttttctggactcatgatacacaactcccagtgaattatgtcacaatatttgttcgtaacacttggaacttgcctgtaacacatactgatgtaataaattctatgagaacaggtgaaacctccctactttaaatcacctgggacactaatttttttcctctgtgaatggtaattgatacaaaggcacaggtgaggacatggactgaataactgacatttcccttctcctagaatgtaatattagaatgcattctatcctattagcattctattggaaggctccatagagcaccccatacagaacactgccatcaaaaagaggactgggctgggcatggtggctcacacctctaatcccagcactgtgggaggccaaggcagacagatcaccagaggtcaggagtttgagatcagcctggccaacatggtgaaaccctgtctctactaaaaatacaaaaattagccgagcgtggtggcacacacctgtagtcccagctactccagaggctaaggcaggagaattgcttgaacccggagttggaggttgcagtgagtggagatcacaccactgcattccagcctgggcaacagagcaatactctgtctcaaaaactatataataataatcatgcatatttcacagagaagaaaccaagcctcaagagatgaaatgactgctccaaggtgacacaaaaaaggcacagtccattcaactagacctccccaggatcttggaaccatgttttttccttcttcccttaccatattcattcaatacattactgcatgcctacctgggccagaaacttctcagacgctacacatgcagaagggaatgaaatgaaagacaaatggatgctgcacccattgttaagctgtaacattgtaaaggaagagggtagtgagaaagacacaagtacgccatcaatgtgggtttgaggcagaaatgttacagagcagagctagatattgcaaagtgataaaggagctgtaaggagaaaaacaaaggatgagaaaactagtatttgcacaacagaggcacatagtgtaagtaatcaaatcagataaattctgcacctgcttgaaaataaaacattagaactaaatatatacatctgtgattccatgtctacatatatatgcatatacatttaaaggatttttaaaattcaacaaatatttctcagttgagcacgaatttataccaggtgtataaagcaatgtataagttccatgacagacacaaataaaccataccaatattcaccagtcacagagataatacatatttttatgatatagaatgtgcatcatttctaaacacctatttagattaactaggatgagctcacgcacacacagagaaacacaaatgcacctcccagcattcaaacctataaatcagtgaatatctcagggctattagaaaacattaattcaattcctcaagctaaattacatttcacaatttccatcaatggacttgaatagaaccttgagatgattaatgttttatcagagattacccagacaggggaacagagagcctgccatttcaaatttagaatgttagttcagtaccacctgcacagggaagacatgagctaccattcatatgagcattattatttaaatttggtaaaaacttgaaaaagttcaacttatttaggaattcatttctgtcatttaagactcgatattgttctcttgctggaaaccaagagaccggagatttctgagaagccttagaaatcccactgttaaaaaagatggataattcttctatgatctgggctccagagaggaataatggggcatggttttgcaagactctgcgactcagctgtttgaagctaacccatttttcatagatttgcatttattacagcctacaattatgacttatgcctctcccaagcactcagactatagcttctttttgcacctcagagaaagcaagggtttattactgtaatagtcaatcatatgccctgaggacaatacagagcacagggcacgtgttttgttagtaagactttctgttcaacctaagcatgctcttggaaggacctagtatgtgtataatcaatttgtaaaaacaatgtctttgaaatgacccacagtttccacttaatttaatgactattacttttaaactcatatttccaactaccagaaagtcttgaggaaagtgtgtacaggcactgctgttataaagaagtgaactaaatggtcttctccaatatttttattaactgtgtgatgcacttataccagtatacatatccatgaagcctgtataaaaagcttttcaactcagctctcacctggctatgcaagagaccagaaaacctcaagaatggagtaagtgatgccaggaattacgacgacaggattatactacctgaaaagtcctgaaggtagaggaggacgacaaaaagaaaatcggcttcaaaataagtcaaccagcctgtgcaacatggtgagacctcaactctacaaaatatacaaaaattagccaggtatgatggctcatgcccgtagtctcagctacttgagagggtgaggtgagaggatcacttgtgcccagagagctcaaggctatagcaaacatcataccactgcactccaggctgggcaaaagtgtgagaccctgtctcaaaaaaataaaataaaataaaaataaataaagtcagtcagatgagggcttttaaccaagttttggcatctccagtgtggtacatcttggccatgtgactctctttagtttctccatgtagcaccttggagtcattctctttctaaatacggtaatgtctaaaacacacaggacagagctcagctacagtagacatgtagcaaaggactgttataatgattagtcttaatttacttgccaaacaaccaaacttgagactggagttccacagttcaagaacatgaatactttttaaggcttaaaagtaaaaacattctctaagaatatcacaatgtcaagttcagactacagtttgtgacattctgtctcccttcttccattccggctttgaagaagtcaaatttgcctctcattgaatgtttaagtctttcttgtgggatggggtaaggagcaaagattcatgaactgaaactacaatagaaatttccattgcaaaatattaatggcctaagtatttactgagtattcattcagagtatttgttaaaagtcatttgaaaatgtaaaaataaaaaaaatttacttaaaactagaacttaagtctactataaaatgtgactacattccataaagcaccttacaaggcacaatgccatcaatttggttaaatttcaagttgatttcactacattttcttatcctaacgagtacccagtgacactctacatgccaattacagtgattcttttcagtcagtcccatctaaactatttcaaggaagaagggtgtctggtactataaccttctaggaaaaagaataaagtttctgtatgctgtagtggaatgaaataagcttttacattgaaacagacacaaaataaaattttattttcacttagttatttcaaatataaggaattcattatttaggttaaaaaaaaacactctgtcacagtttatacattagaatttccttggttttcttttttcctattctgcctcaaatactgaataaatgaagccaggtgcagtgactcacacctgtaatcccagcactttgggaggccaacgtgggaggattgcttaagcctaggagttcgagaccagcctccccaacattgtgagaccctgtctttataaaaataaataaataaatgatgaagataaaagcttaatattacccttgtattgcataccaactttttcttgaaaaacaatggaagtggggaagtggataccatattactctttaagaatcaaactttgttcaaattattgcttttgtgcccaagctctaattcaagttaaatgtgagagtcactacagatcagatgagattcagcatgcctgtggaaataactttgggagcactcaagtttgtaagcaatatccatcaaatccaaatttttacttttttttttttaaggaaatgtactcacttagttgaccatacctgcatatggaatttccttctatcacaaacacacaaatgtttaaagcccttgtattagtctgatctcacactgttatgaagaaatacctgagactgggtaacttataaagaaaagaggtttaatcgactcacaattccacacggctagggaggactcagcaagcttacaatcatggcggaaggcacctcttcacaagatagcaccagagagaattagtgcagagcaaagtggggaaagccccttataaaaccaccagatctcgcaagaactcacacactatcacaagaacagcataggggaacttctctcatgatctcatcaccctccacgagttcccttccccaacacacggggatgacaatttggatttcaactcaagatgagatatgggtggggacatagagccagaccatatcagccctgcagaaaatgccaacacacaccacaggtgctaatccaattccaggcgctgggaggatgagacagggaagggcagggctagtgattccttagtgcagcaatctcagagagtggcagagatttgcactcacaatttgtaatatattacctaaatcttaaataactctcaagagggactgctaaggagagtggggatttaactagttttaggtacatcaataagaaattgctcccagctgtagacttaaatatagcgagtggaaattttacacccccgtgccaaagatattccaagaatttgcctcaccaaagaaacactgaaaactacagaaggttctaggctcctatcagaatggtcaaggaaaagattctgggtgttacgctggagcagggaaaacattagtactgaaaggcattagcaagaatatactagagttaagaacagttgggaagggtttggtgttgtcagtcgccttggatttgtggtgatggcaggaccggcatggcagctgctgctcagagcacctgacctacaagaagcataactgcacctcctcctttagtataattttagcgcttttttttgtttttgtttatatttatatataatataatattgatatactgcttgtgtgttttataatatatttttggctttcaatcatcaccaataagttttgctggcatcaacatcttacttttttaactttttaaatttttatttatttactattattattatttttgagacaaggtctcactgtgtcacccaggctggagtaggagtatcacaataacagctcgctgcaccctccaactcctgggctcaagtgatcctcccatctcagcctcccaagtagctgggaccacaggcgtaagccaccacatccagccaatatcttgtttagaaaaacaattttcactttgccatattgaaaacattgtttccaagaaaaacaattcttagaattatcctaattttctgtgcatagggaagatgaagctggggtaagctggggtacacgtggagatcggaagaggagaagatgacgtctctgggtatggggaccacaccttgaccctggctgattgtccagtgagctgggctgggggcatcactgtctccagaagcaggagggcgaactgcactttcagtcagcaattaagccttaaatatctgctgttgaaagaaaagcggattctgatttttgccactgggtgtcaattactatttgttaagattctgaagtagtggctttctcacaggctctaaacccacctctataagaaactatcaagaactctgaaaccctttgtctttgaaaattcagacatttatctacttttaaaatgagctcataagtaacaactgttacgcctaagtgtctatctgtaagagctgaaaagtattcctgagctgagaactgcagaacgtagttaattatgcacattcatatcatctacttaggacactgaagaagagaaggaattctagcatgttctgaggaacaagggatctctgaagttgcccgcagaataaaagtgagcctaataaataacacctactgaaaggaagaacacaaagacacaattaccacaaaaaaatgatattacaaatatagggaaggtggaattttaaatataaataaaatactgaaacacagaactggcagcagatgtcagtttgaaattaaactttcagctttatgacaaggaatagtccacccttgacttatatatcttagtattcaaaggcaaaaataaatagaatattcaattactgttacactgtaacttttcagagcactctcttgacaatatgagaatgaaaaaaaatatttttttaaatcgagggaagagtgaatgtctgtaaacaaggctctttttccaaaacatttattaagctgaactattattacgcatgcttcattttaaaccaggacttcattagtaaatggggttgcaccccattaccaaatacatttgaaaactggggaaaacaagggcaggggttcaagagccatcagtaagtcctgggggtaccagcagtaaagagttataaagagcctctaacacaggagacaatgctactgccatagacctgcagttacagatctgaacactcagattcggcatatcttggcaaagcattcccaagactgaaagcccaagcccctcagcaccatgaaggatggccttccagagtccagcccctacccaccctgcccttgatggtccagaactgcacacacagaaccctgccccagcctctgccagtgtggatacctctcccaacaccaggaatatccctgcgccttcccctgcagctaaactgacccaatcaacacaagggtcatgcctgaaagcgttccccattctctacaaccatcacccgtctctccccacactcccccaaacaaaacaaaacccacaagcaaccgcatccccacttccgtcatcagcacattccgaagatgactccatcataactcttagcgtaagtatggcttggaattttcatcgctgtcacctaatcccttcataaactctaaaactcatcttactcagcaccagacacatgagggttaaacaaatgatagctaaccctcacttcagccagacccgattccacggctctctccaccgtccaaaatgattaaatcactcagctttaaatacagacataaatcaataaaatgtatatgaacagttcaattccactcattggaagattatgacagaacaggcatttataattagaattcagactgccggcatggaactgagaaacataacccctactaaatctttcttaagagacaactcagactaggaatgttgttatcttcaagtatttgaatgaaccaagtctacataaaattcaactttaaaattttactttatgacctcattcaaattaatgtcaggaaaaaaatagccaacaactgaagagattctctcattttactttcataattcgaatgaccttatgtgggcttacttggttactctgcaggttcagaagtccagatcacagacagtaagacccacattcaacctgaggtctacaagacagcaatgccctttctttccactacaacatgttcatgaaatcatattaaagccatgttttaaatttactatggcataactaaattttccttttaataaaaggccttcttggaacttctttaatctgataaatggtatctacaaagaagcctacatttgtcaaactggaacctttcctctaggctcatgaacaagacaaagagagacatgctactgtcaccatatttgacactgtgatgagatcctacccagcggaacaagaaataaaaaagaaataaaagggccaggctcagtggctcatggctataatcccagcactttgggaggccgaggcaggtggatggcttgagctcaggagttcgagaccagcctgggcaacatggtaaaactctgtctctatcaaaaatacaaaaaaaaaaaaaaaattaaccaaacgtggtgtcaccagccggtagtcctagctactcaggaggttaaggtgaaggatcgcctgagtctgggagatggtggttgcagtgagccaagattgtaccactgcactccagcctgggcgacagagcgagaccccggtctcaaaaataaataaatccattaattaattaaaataaaaggtataaagattggaaaggaagaggaatattgttgttatttatggaacacatgcagaatgtctgaaatgaaaaaaaaaatcagtaatatccagtgttagggaggatgtgaaaaaacagcatccatgtgtccaccagaatatctgtacatgaatattgaaagggacatgttcagagcaggaccttaagccaaggaaagggaggtaaggggactgactgacccagatacaggcactaaggaacagactgaaaatctgaaaacaattagtctgaaaattagtcttgtttttatgatcaccacatactagcaatttcaaacaatgtcacagatgaaagactcctccccaaacagtatcattttattcatgtaagttctaaatacttggtagggctaccatcaagttttgtttttgttttaatattttgagacagattcttgctctgttgctcaggctggagtgcagtggcaccatcacggcttactgcaggcttgacctctcaagctcaagtgataattcccacctcagcctcccaagcagctgagaccacaagcacgtgccaccatgcccgcccatttttttaattttttttttttttttttttttttttttgtagaaatggggtctcactattgttgcccaggctagtctcaaactcctgaactcaagcaatcctcctgcatcggtctcccaaagtgcacgcattacaggcgtgagccattgtgccaagcctaaattttaatttcaatttaaaattcaaggccaggcacagcggctcacccttgtaatcctaatgctttgggaggcaaaggcaggagaaggatcacgcctgagggccaggagtttgagaccagcctgggcaacacagcaagactcttatctctacaaagaaaaaaaaaaaaaaaagcaaaaattagcaccaagtatagtggcaggggcctgtggtcccagctactcaaaaggctaaggcaggaggatcttgagtccaggagttcaaggctgcagtgagctataagtgcgccactgcactctaccttggatgacaaagtgagaacccgtcgttcattcattcatgaataaataagtaaataaaattcaaattagcatattaggttacatgacacaaatgtaactagttatttatgctttagtgaacattatttttcacatggaagttaattcagaaaactcattatagagcggcccaccccacaggtatcgagtcacagattcatttcaggtaagctcctaagagttgagaaccattcaagcttgccctaagcacagcttgtttctccaatccctgtggcactatggaatccttcagtttccgactacatttgaaattcattaaatatcattaaaaaatgatagcaaagtttattgcaatgataaagaaatacaacttatttccattctgtcattctacatgggcccttggactttttatgtgtgcttaaaattttcagctatggagacatcatttgaaactcactagtttaatccccagaagcgggaaaaaattgcaattcctggaatttactgtgaaatgagatgtttatgaaactcaggcaaaattatcttttatctgtaagacgtttcctaattacttgtatagagattgttcctttatgtgaaagaaatttttcaagattaaaattataaaaaaaagaagtgtactttgtcgaactataagcaacaaagatattgacaaatctcactctactgtcttactgaacacgaatatatggcagagataaattctgagaaagtcgctgataaatttgcagaagactcaaaagagaaactgcaacgctgttattcattactggacagatcaatatatgtttacacttttcacttttcaaaaaaaatttcaatgttactaaaaactattagtccatttctttttttccttcttaatatttatttttaactgatagaattaaatattgtagatccactaatggaaaactttcactgaatttctcttctggtgattattattatatgtttcctgctctaattatgaatgaaaatacaaaatttgttgtatactagggtggtgtaaaaataatccatgctggatgtcaactacactaggtatgccactgataagaaacagccccaaaatgaaaatactcttaaatgtccatcagcactagaatggagtaaaaaagaaaattgtggaaaaatcatacgacaaaatactgcacaagatggactactgttacactcaacaacacagatgaatctcacagatgtaatatgagaaaagcagccagcaatgagagaatgtataatgtacatatgtataatctatggtgtgaacatcgggcaggatattgactgggaaggccacaggcgagccttctggatacagaaagtgttctgtatcttcatgtgcgtgaaagttacataggttcatagacatgtaaaaacttctcaagccttcactatatatcctcttgaattttttttaaaggcctctactgcccacgtaggcacacaattaacagaaagcaaaactgaggtccaaaaaatgtcaaatgtgtatgtaacatcattagtacttaaaagttattatagatagttaacaatagttgacacataatagtgctgtggttttgaaatttcaaaatgtaattatgttctatcctttggagtgatagtttggtagagagcgattaagggaaagaagaaagtacagtcaagtcctggagcagtggacagctgtcaaaattaacagacatgagggagtataccagaaaaataaatgtggtgcttagaaaattacccctggctgacaggttgtcaaaatgtcccagaatgaagcaatagtgccttggtgggctgcaagtttaaatcagaaccacctgcctggtgctccgcagctctggtgttaagttgtgtccttgtgtcccttaagagctcatctctgtccctgatggcatctgcccttggcacagaagacttgatacattccaagagccccaggggttaatgttctttgcccaatgacattattaacttgcctaaattcaatctgcaaagattgtctcttctgcctaatttgttccaaaataatgtgaagaggaagacaaacagtcacggaacacattgaacaagagatgctgaattcaggatggaacatttcatcttttgtttgggcaaaggggtttccaagtcaatcagagttcaatatgcagactagaaccttgattaggaactccaaacgactcatttctttgccatgatctttagaaccagaggcaagtaatagtacgtgaggccataatattcatcccaacatattagacagggagtagaaggatcagaggaggcagaaaatgagcacagaatgaaaacagaaaaactgtaccagaaaacattaaatttgcatgtggtactcacagcaaaaagaaaaagatgggcaggcagtaagttggtttaggccactgccctgagctcaatgacagacagcaaccaagggcacagtacacagagaaaactgtccgacacgcagccaatccctccataaccagatcctggagtaaggcggtgacggtcaaaggtgtcttcagtcccaggtgcgtccaggaacaagaaatttaaaaaccatccagttttccccccaaaacctgctaccttaaaatcctcttaagaagtgagtaaatcccctcaggccacaaaacagggaccaaaagcaagggcaaatgtccgagtgaaacaaactgcaacccatcagtcaacaagtacaactaatttcttgttagtcttcccagttttcggaggagaaggaaactgggtatgagatggttaataccaagtgtcaacttgattggattgagggatgcgaagtatgaaccctgggtgtgtctgtgtgggtgttgccaaaagagataaacatttgactctgagctggggaaggcagatccactcttaatatggtgggcgaaatgtagtcagcttccaacaaatttaaagcaggcagaaaaacatgaaaaggagagacaggcctagcctcccagcccacatctttctcccatgctggatgcttcctcccctcaaatatcagactccaagatcttccgttttgggactctggctctccttgctcctcagcttgcagatggcctattatgggactttgtgatcgtgtaagttaatatttaataaactctcctttatttatatatatataaagatatataaaatatatataaagatatatatgatacataaagatgtatatgatatataaaatatatagagatcctattagttctatattacatatatattttcaagattaaaattataaaaaataaaagtgtactttattgaactataagcaacaaagatattgacaaatctcgctataccgtctactgaatgcgaatatacggcagagataaattctgacaaagtcactgataaatttgcagaagactcaaaagagaaactgcaatgctattactcattactggacagatcaatatataagtttacatttttcacttttcaaaaaaaatctcaatgttactaaaacctattagtccatttcttttttccttctttgtacagtaatatttatttttaactgatagaattaaaaattgtagattcactaagggaaaactttcactgagtttctcttctggtgattattattatatgtttcctgctctaattattaatgaaaataattttgttgtacactagggtggtgtaaaaataatccatgccggatgtcaactacactaggtatgccactgatctgaaacagccccaaaatgaaattttttttttttttttttttttttttttttgagacggagtctggctctgtcacccaggctggagtgcagtggtgcaatctcagctcactgcaagctccacctccggggttcacgccattctcctgcctcagcctcccgagtagctgggactacagggcgcctaccaccacgcctggctaattttttgtacttttagtagacacggggtttcatcatgttagccaggatggtctcgatctcctgacctcatgatccgcccacctcggcctcccaaagtgctgggattacaggcgtgagccactgtgccctgccaaaaatactcttaaatatatatatatatctcctatatatatctcctatatatatatatatatatctcctatatatatatatatctcctatatatatctcctatatatatatatctcctatatatatatctcctatatatatatatctcctatatatatatatctcctatatatatatctcctatatatatatatctcctatatatatatatctcctatatatatatatctcctatatatatatctcctatatatatatatatctcctatatatatatatatctcctatatatatatctcctatatatatatctcctatatatatatctcctatatatatatatctcctatatatatatatctcctatatatatatctcctatatatatatctcctatatatatatctcctatatatatatctcctatatatatatctcctatatatatatatctcctatatatatatatctcctatatctatatctcctatatatatatatctcctatatatatatatctcctatatctatatctcctatatatatatatcttctatatatatatatgaggaaaaactcccctttatatagatatatcctattagttctttatatatatacagaactacatatatctatattactatacatatataaagggaaatgtgtgtgtgtgtgtgtgtgtgtgtgtgtgtgtgtgtgtgtgtgtgtgtgtgtgtagttctgtccctttaatagaaccctgactaaaacagcgtatgtctacagatgtgtgcaggtgtgtacagtcacgtgctccgggtgcagagaaaggcagtataggcaccacaaactcaggcagagtcacccagaggaggagaaagatgaggctggaggcaagtggaaaaatcatgcctgccggatccagttcccctcctcaaatctgcatgctgtggagcatgattttcaaagatttcttttggttggttggttttttctgggacttggaaaataaagaagctacatttttataaaagttggagcatcagcctggcatagtggctcatgcttataattccagccttttgggaggctgaggcaggaggatcacttgaggccaggagttcaagaccagcctgggcaacatagtgagacccccgtgtcttcaaaaaaaaaaaaaaaaaaaaaaaagtctgtctatcaataagacagctctggctgggcatggtggctcacgcctgtaatcccagcactttgggaggccaaggcgggcagatcacaaggtcaagagatcgagaccatcctgccaacattgtgaaaccccatctctactaaaaatacaaaaattagctgggcatggtggtgcacgcctgtagtcccagctactcaggaagctgaggcaggagaatcgcttgaacccaggaggtggaggctgtagtgagccgagatcacaccactgcactccagcctggtgacagagagagactctgtcttaaaaaaaaaaaaaaaaaaaaagacagccaaacacagctggagcatgagcatgtaagtagctgtccagatttgtagatagatgcataagatgagaggccacgttgagaaatgtgtttcagcacaaatcttaatctttgggggcccatctaagttcctggaaaactagtaccaagttttcttcaccttacagatttcgaaactgacagagcttcaccctatcccacccacaaagtcattactcaagacccattaaaagtgtaagaaattccggcattttacagataaatgcacaacacaggcaatatgtatttgcaaacaaccctccagggtacacacaaatatgctaaaaaatgcagtatttcacagacatatcagaaataagaagatgacaacctcctcaagatgaggcttaaatgatggattttgtgccaacaataggaattcttaatgcataacagctagaagagccactgaataattaagtaacttcctgggatagtgggagggaaaagagtgcaaatgtagaatgaatggatttaaaaaaagggatattctgtgttttgtacaaattctaataattacacaaattccaaatgacagctaccctaggtgatatctgttcacatgatcctttttctgttgcaaatatgttggtaaaaggcaggaaaaggtaagtccatcctttggcacctataagatacttctgtttgcatcatggacacactcctgtgagctcagtctgcagtctgtggaaggaccaacgaaaactttaaagatctagaatgtttagggctaagtcaactcccacgccattctgttgtctcatattagaattaagaaccaaagctttgtgagaaacatttaggtgcttttctttcacctaacatcagatcagagcaggctttgtggataccacccaccctggcatcagcacagatctcccatttatgtatttatttatttattttgaagctctgttgtcaatgtcttgaaattcttaatttttgaacaaagtgccctgcactttcattctgcactgtgtcctgcaaatcatgcagccagccctgagtaatcctgaggaagagtcttgtttgttcttaggggctcactcctcttgctggctgctctccaaactcttccacatactgacatgtgtcaagcctctcaatgctgcacggtcccagcacaggatgctgcagccatcagagcaggggatttcagttcttctgaattccatgctggtaaaacatactagaattaaaatagactgacagccacccacaaccgtttctccatgatttctgcctcgctcttccacaattactacccgcacccatagattcttgacaacgtatatagcgtaagagataatacaaacgttgggaaagatggaaatcattgtattctccattacatatatttaaaaaggacaaaaaaccttcctagagccatctagttcttaggcaccaccacaatcagctctctgtatccatgcattctgcatctatgaattcaaccaatctcagattgaaaatattcagaacaaaagaatacagtaaaaaagaatacttttttttttttttttttgagacggaatctcactctgtcacccaggctggagtgcaatggcccgatcttggctcactgcaacctccacctcccaggttcaagcagttctcctgcttcagcctcccgagtagctgggattacaggtgcctgccaccacgctcgcctaattttgtatttttagtagagatgggctttctccatgttggccaagctggtctcgaactcctgacctcaggtgatccacccgccttggcctcccaaagtgctaggattacaggcatgagccaccgcacccagcctacaaatttttaaaactaacagggtatagcaacaatttacatagcatttatattgtattaggtattacaagtaatctagagatcatctacagtctacaggagagtagaaataggtgatacgcaaatactgcaccaaccaatatgaggaccttgggcatcttcagattttctctcaactgactagataacccctgttaacagatgcatcaaaaggcccagaacatttaaaaaatctttacaatcctaagattccaggaatgaataagtcattcataattcgactaattttggactcaagtcagtatttcctctaaagcaatggcatagacatctttaaaactaacaattctatttaaaatttagaatccccaggtacattttcaactcagttatttttgtcaattaattatgagtctaaaattaattaatattcacacaacattaaaataagattcctctgtcaaaagcaggccaaaattatcaccagtagataaatataagctccaataatttagcatgagaaagtctgtagggcaggttttgtaaaaatggaaatttcaaacaatgcaaggcaaacaccaccaatctcaatactgtcaagactgtgtggatactgaaacctgctcttagaagtataccacactcctgagatacagagccagttggttaaggagcgtaagaagagatcgaggtcttgagtacttacttccctctttttgtttgtttagagacaaggtctccctttgtcacccagactggagtgcaggggcacaatcatagctcgctgtattcctgaactcctggactccagtgatcctcccgtctcagcctccatagtagctagggctatctagccaccatgtcctgttatttttatcttttgttttgtcgagacaaaacaaaaaacctgttgtgcaggctggtctcaaactcctggcctcaagcaattctcccacttcaacctcccaaagtgcgcccagcctcttacttcactctcttgatcgtgtttttaaaaccagcagaaattagcagaatgttacaaagtgctaggcaataaactatgagacgagaaaaatcatttgacattaccgtcagaaaggctgggaaaccttctgcagaattatttttattaagagtagtgaaatttctagctagtggaaatataccaaaacttaggcggaggccaactgtttcaaagttcagaattttataccaaaggggccttttattgaagctctggttattcatgatagattcatccacatctactctaatctctggtagtatattcctacactatttaaagtgcattctattggcaacgactggaagtaatattaaatatatcggctagggcatgtggcaagaaggatgagagtcattaaactctcctgaagttccaatcaataatccaggtacctagcaaaccatccagggaacgtgaaagttgctgaatgctcttgattaggaggccaccgatacagctattatcataagaaatgctctgatacatacaaagaaaaactgtcactacattctgtcactgtttaaaaaatttaaaaatgccagtactcatcaagaattggtcggacattatgggaacagaatactctaatattaaacagaaatctaggcttagagcagttaggaagatgacccagtaacccaaaaagggttacgtgtggacctgagttaatcaaagaaggaaaaataagcatgcctgtaaccaagaatcagtgtgaggaaaattctcaggagccagtatgatcgtgggtgaaatatggagttcctagaatacgctagacagattaggagtttccttttttgaaatatatatataatgtggttgctgacagcattttgttttatttcagtttataatctttattgtttctgagcaaaattaaactgctaaacattgtgtatgtatgattaactagtaggtatactctaagttttataaagtttgatatgcaatagaacaattagaagtacccacagcttttgattactgaaaatatacaagacctatttatgtctgtaaagggtggtgtgtggtgatggggagaggtgggggggagtttgaaattttcagctcttaatgattttagaaagtaagcagctcccagggaaatacattcatgcaatgacagaaaaagtaagttgctttcttttcctttttaaaaaatacctagttgctgaaaatattctagtctttgaacagtttagcagagttgaaaccggtctatgttaacgatgcattccaaactcagtcccaaaaatagatgaaaatcatgcaccttgagtgaggcagaataagggccagtttattcttacatgtattaatgcttcagtgctcggataaaggaaaactgtgatggctggtaaaattaattatagctttcaaaggtattctctgtttactagctacttctacaacataaggtaacatacatataaataaatgttttccatcacaactttgtacctttagtatgacattttagaaacattttagctgacttagtttactaacccttggttaggcattacctaaccatgtactatccgaactggaaggcagaacagatcaaaaccaaaccatcaaaaggaacgcagagcatacaccaaggaaggcaaggaaaagacacatgcaggagtaatttcgggattttctgatgccttttaaatttaatttcaaatatgaccagaaaaattaacttgacaaatcacaagattaatactattttagaatcccttccttctagacttctcataaggcaaatcggaatacaattataggctgtctaggaaaaaatctggatcttgaaccaaccacaaaaatcctgttgactcctaaggccccgtacgcaattttccataatgaaatggggacgggagagagctaaaaactgctgaatttattttcatccacgtacatgaagatgggaaataaatgtgatacatttctttcttttttttttttttttttttgaggcggagtcttgctctgtcgcccaggctggagtgcagtggcgcaatctcggttcactgcaagctccgcctcccaggttcacaccattcccctgcctcagcgccccccctacccccccgccccgagtagctgggactacaggcacccgccaccacgcccagctgattttttgtatttttagtagagacggggtttcaccgtgttagccaggatggtctcgatcccctcacctcgtgatccgcccgcctcggcctcccaaagtgctcggattacaggcgtgagccaccgtgcccagctgtgatacatttctaataaagacactgaaatgtagtatgcatctgttcatgcagtatataacctatacagaaacataaccataggctagaaatgtgtgtatttaattgtatgtttatgcctaagtgtttgaaagctgtgtttaatatgaaaaataataataattaaaaacaattttaacaaatcctattccaaatataccaccaaaatattgaaatatacacacattttccctatcagagagaaattattctttaggaagaggacaaccattttgtttttaaagcctaatacaacggaaggttaaaaaacacttaggaaaaagaaaaaataaaaagtagctctttacctactttttccaaaggatcgatatggacgtgtaagatgacaatcgtgtgagaggcacaatgtctggtgctctacatgcacagtcctagctcagctccttaggaatttcacccaactttggcaaagccatgtgaaccttgatgattaatttccttatctggaaaactggggcaacaattcttaccctagagggctatagtgaggttttatgagctaatggctgcagaaagcttcttaatgctggtatatagtaccagacacaatgaataaaaaccactgttgctagtcatcatagcaatgctgcaagatggatatcattattctcattttgggaaaatatgaaggtataacttacttgcctgtgaaataattgagcaattgtggactggaaaacagctgaagaggtgataaagtaagttgaacagccaatcaaataaataatgctagttactgtttctctgtatcttcaataaaaattaatcttttaaaaagttaacatatataattatccacagtgtacaaaacctaaacctacataggtgaccataaatcaaccaaagctacaaacagtacaaatattaataaatatttctacctaaagtccaacatacaaagtaacccttttttcctgaatttaaaggcatgctcagaactagcctacgattgctcaatcatttcaagttattttaaagcattaaaataagtgtatctttgcacttttataaaaatacatttaaaacatagcaaagtgaacaacaaatcaaaaaagcaaattcccctcctgattaacctgtgtgcacatacacacacactgaccacctgctttctttttgattcagcttttagtatcacctttcttagggcttgctagtgaattacaaagatatataaaaagaaagcagccccaaaacacttttatggcttgaaattggagttcaacaacatctgtgcaattacgaagtatatcttgtaggaataatagagctatgtatcataaatacataccagtagcccaatggtaaaatcattaactcttacttaattactacccactctctgaaatgcacatggtccagcttacaattaatcataattattcaacctcacagcatagccccacacagcatccagaggattcgcaaatgtgtggctttcttattcattctgcctattataagaacagaaagaaaattcagacacaatggcaccacaggaaaaagggcaaacaaattcatttcctgtagaataaaaaaaaggtttaaaacatagttttctcgtccacattctccggagatcagcttccaagattctcagtttatgggagaaaccaactagggtgaatgtggagaaaccattttgcatctttttctaataactttaatttttaaacttgctttttaaaatgatgttgcatcacaagctacgaatttatcatctattgtcagcaaatcttttcctgaactaacttattcaagatataaaactatagcaaacattaagaatgtactacctaggctatccttataggaaaagtttataaacagggaaacatgagaacatgtatactcatacatacatgtgtttgtatgcttgatctagctttcaaaggcaaacagctaaattcaagaaaagaaaaaaaaagttttcctactgtaaaaatgtattccttcttgggaaaagtaataatattaagtcaaccaacatagaaaagtaatgtgaggccaatgacctctctccttttgctccgctacatgggatgaaggactaaatctctcagaggaaggaccaggaacctgggaaattatttcagagttggcgctaaaaaaacagctaaccagagcagaagctctggaaactaattgaaaatatcaagaagttctctaacaatgagtagtcagaagattaagggaaaaaaagaaataaaagccataaatttaaaagaaaccaagtcagacattaaaataagtgtcctattctagggtaacaaggctgattatgaatgataaacagtttattaacaagttatctcattggacccagatcatttctttctttaaatcatgcaggcataaacataactaaacatagacatgtatttttaaatgttttaaatataaatgtctacatatatttaaaagattttaaagatgtctaaatgtctaacacatatttaaaacatttttaatactggttgatatttttgcttaactttctaaataaaaattaagtacatttcctattgcccaaagtgatctacagatcgaatgcatccttatctagacaccaaggacattcttcacagaaatggaaaaaaaatcctaaaatttatatgaaaccacaaaagacctcaaatagccaaagtgacactaaacaaaataaacgaagctagaggcatcccactacctgactttaaaaaacgcaaagcaggccgggcacggtggctcatgcctgtaatcccagcacttcgggaggccaagacgggtggatcacaaggtcaggagatcaagaccatcctggctaacacagtgaaaccacgtctctactaaaaatacaaaaaaaacttagccaggcgttgtggcgggtgcctgtagtcccagctacttgggaggctgaggcaggagaatggcctgaacctgggaggcggaaattgcagtgagccgagatggcgccacttcactccagcctgggcagcctgggtggcagagtgaggctccgtctactaaaaacaaaaacaaacaaaaaaacaaaaacagaaacaaaaaacaaagctacagtaaccaaaacagcatcagcatgggagtgacataaaaacagacacatggaccaaaagaacagaaataaatccacatacatgtagccaactgattttcaacaaaggcaaaaagaacatacatacagtctcttcaacaaacaccactgaggaaacagtgtaaccatgggcagcagagtggaagtagacccctatgtctctccatatataaaaatcatctctaatggattaaagacttaaatgtaaggccaaaactctgaaactactacaaacaaacacaggaaaaaggcttcccgacattggtctgggcaaagattttatggctgagaactcatgcaacaaaagcaaaaatagacaaataaaattatatcagactaaaagcttctgcacagcaacagaagcaatgaaaaaagtgaagcgacaactacagaatgggagaaaatatgtgcaaactattcatccaccaagggagtaaaatatacgatatataagaaacgcaacagacaaaaaccaaataatccaatttaaaaatgagaaaatgatctaaatagagagttctcaaaagaagacatacaaatggccaagaaacatatgaaaatatgttcaacatcattattcataagaaaaacgcaaatcaaaaccacactgtgatgtcatctcaccccagttagaatagctgttaccaaaaagacaaaaaataacagatgctggtgaggatgtggagaaaggagaactcttcttgtgcacccctggtgggaatgcaaattagtacagcaattatagaaaacagaatgaagtttcttcaaaaaataaaaagcctgtaattctagcactttaggaggcagaggcgggtggatcacctgaggccaggagttcgagaccagcctggccaacatggtaaacctgtctctactaaaaatacaaaaattagccaggtatggtagcacatacctgtactcccagctacttgggaggctgaggcacaagaattgtttgaacccaggaggtggactttgcagtgagctaagatcgtgctactgcactccagcctgggtgacagggtgagactctctcaaaaaaaattaaaaaaaaattaaaaaaagcagaacaatcatacatccagcaaccccactgctgcatatacacccaatggaaaagaaatcagcacatcaacgaaatatctgcgttcccatgttcactgcggccttattcacaatagacaaaatattggaatcaatctaagtgtccagcaactgatgaacaggtaaagaaaacgtggtctatacacacaattgaatactattcaggcaacatgaatgaccctggaggacgttatgtgaagtgaaataagttaggtacagaaagataaatacagcatgttctcacttgtacatggaagctaaaaaagttgatctggctggctgtggtggctcatgcctgtaatcccagcactttttgggagaccaaggaaggaggactgcttcagcccaggagtttgggaccaacctgggcaacacagggagaaccatctctaccaaaaaaacaaaagccaggtatggtggcatgggtctatggtctcagctactcaggacactgaggtggaagaaacatatgagcatgggaggtggaggctgcaatgaaccaagatcacaccactgcactccagcttgggcaacagagcacctgtctcaaaaaaaaaaaaaaaaaaataactaaattaaaaagttgatcttggccgggggcggtggctcacacatgtaatcgtagcactttaggaggccaaggcggggatctcttgaggtcaggagttcaaaaccagcctggccaacaaggtgaaccccatctttactaaaaatacaaaaaaattagccaggcatggtggcagacacctgtaatcccagctactcaggaggctgagggaggagaatcacttgaacacgggaggtggaggctgcagtgagccgagatcacgcaccattacactccagcctgggcgacagagcaagactctgtctcaaaaaataaataaataaataaaaataaaaagttgatctcatagaagtagagagtaagccagtgcttaccagagactgggaaggggaaggtaggaagagattggttaacagacacaaaattacagctagataggaagaattaagttctagtggtctaaggccctgtagggtgaaaacaaatactaatgtattgtgtattttcaaatggctggaagagaaaatttttaatgttcccaatacaaagaaatgaaaaatgtttgaagtgactgatatactacttaccctaatttgaccattacacatcacttaaatatcacaccgtatgccataaatatgtataatttttgtcaaaaataataaaataatgtttaaagtacatttcaatttgtctatagataacacagtatttggtccacaagaccacaaccaagtgattatttctcaaattaaaagcaaagcacacacagactgaaggcaagggagacatgagtaggcagccttcatgggactggcttcataaatttaaactcactaaagggatgcctccttcaaggaataaagggctacactctaggggctcagcctagagagatcaaaattatacatttatttttttttacttttttatttctcagattgggttaaaactgtgagagagaaaacttttaaaacctacagtttgttttgaaattttaaaagtaaaacattttaaagtattagctatggcttctctatacactgtggcactcaactgtattctgatggaaaaatcactttcttttaatagaggaccgtcaaaactatgacctttctaaactataaccacagggctgtttaaaacattaaaaacaaagcacaaatcctctaccagttcctctgaaatttgggcttcctaatctgtatttaaatttttaagaactttaaacatagctgtatttattaagtgttcaacgattttccattaacaatgacctacactcaattaatgaatccaaataaaaaagtcttttaacctaagacctcccaatatcagaagatgtgcaagtctccaagctccttagaaattcttagtttgcttcaaaatagtgactcccgcaaacactgaaatagattccttttccagcatacttaaaatagcttttcttaactcttggtgacatcaagtgacatcttgtactgtgaagtcagaatgtaagaacgcttccacaacagtggcaaagtaagtcacaattcaggtaaaaatgagaaagtgacatctccaaaaacaaagtaatagcactctggtaaacatgcctatcaattcattttaaaaaaaaaactggacccaaaaaataatagacccaaactgaactaatggtatgtatcaatcaggaaatagatgagccactttcaaaacttcaaatgtcttcttagctaggacatccttcctgactgactgtttccaataggatttccaaaatatcacactctacacatctaagatcacaccactttccacccgttccacattcctgtctggcagaggcactggctttttccaacctgctggagtcatgcacacctcctcctctctcctcagttacacaggtgactcctcaacactaaggtaatatttaaggtcaaccacaatatgatcccagtctcctttctggtttcacttggtgccacttccctaaggtttcctctttgtcctcagagcacacctcgtgattcttagaaattagctttcactcatcccacagcccctcactggatgctctagagttcaccaatatagtcccataaagccttttttttttttctttttttttttgagacagagtctcagtctgtcacccaggctggagtacagtggcatgatcttggctcactgcaacttccacctcctgggttcaagcaattcttgtgcctcaccttcccaagtagctgaaattacaggcatgcaccaccacgcctggctaaattttgtatttttggtagagacggggtttcacgtgttggccaggctggtctcgaactgctgacctcaagtgatctgtccgcctcagcctcccaaagtgctgggattacagatgtgagccatcatgcccggcccacagtcccataaagtctttacggtgtagctcaactccaccttctcctaaaaaattgtgttgttctctcttcaactacaatggtgatgctgacacttatgaagtttattggcattcaaatatttattgaatgaataaatagcttaaatatcctgcattttattgtatagaattataatgttatttgccaacttttttcttttttaatttttattttaccaccaccaccatgagattggaatactccagcatgggtagtcatctcgtttctcacactgctgaatctgtctgctgtgatgctcacattgttatggaaacagtaggtgctcaaatatttaatggagtctcagaatataaatagcattttaggatcatctggtttaactaccagttaaaaatctttgaatgtcctctacaatatttctactgctcaccctttacctgaactcccttcctccacaggcagccaacctcaatgtttgagagctctgacttcaggaaactgttcctgacactggctctccagccttctccctgatattgtataaaataagcttacctctctctgtttctgcataatataatagcagaatgaacccttatgaaggttcatcccttcatgcattcactcaacaaataccttgaggccaggcacctgggatataaagaacacacacaccaccaccacctcctcctcagagaccccactctcatggagttaaaaataagcataaaatatagatattgttcaaataatcacccatgccatatatgcccagatcatcaaccactggcatgtggtataatctcacctccccttggttattctgtgttcttgctcccaaatgccaccaatttattcagaagacatcacccacctccctgacaaccaagatatgactcctactcctccactggtagccaaagcagtgaaacccacgcccatttgtgatcccagatcccatttataaggtccaaattcaccattcctggaaaccaagaggttttttgtgatgtaggaagtgtctctcttcctcattcccccatctgaaacaggaggacccattttgcaaacaaaacatttcacaaaaccttaatacataaaagagctgaagtcaacattagcataaatttatcttttaatttggaatgcatgcccatttcttattaaaaagacaatcaaaggaaacgacgaggctgtttgatgaacaaaacagtaactggaaattgggatggagcattacatcaaccttgaaatccaatttgtttctgcatttctgttctacttacaaagcatcagcttaaacctctcacagataaatagataaaaagctcaccttgcaatttcaggatgctctttaattaaacggattcaaaagcttgaaaaagaagtgggaaatttcttagtcaaaaagttgaatcactaacaatgaaccagctctcattttttatgaaaactgcaggagaaacaagcacccattccttagaataggccaataaagaaaaaagaaaaaccacatatgcacaaaaaaatacatcttgccacattttgctacatgtgttctttcattattacacaagtgaagcatctacaacttccctggcacttaactaagcctggtgtacaagtgcaattgccacatacaaaaatggtacacatttaccagagtgggccagggtgaaaacccaaccttccccagtaacagtacattggagaaacctttgaacagagatggcaggagatgccagctctagtctaaggtttgcgcagaaaaagatttcatctggcaggacacatgaaagaatcagtagtttccactttttttgttgtttgttttttgtttttgtttttttgggggttttttttgttgttgttttgggggtttctttgaggggagggaagagtctctgtcacccaggctcactgaaactccacctcccaggtttaagtggctctcgtgtttcagccttctgattagctgggattacaggtatgtgccaccacgcccggctaatttttgtatttttagtagagacagggttttgccacattggccaggctggtctcaaactcctgacctcaagtgatccacccacgctcggcctcccaaggtgccggttgtacaggcaagccaccgcgcccggcctagtttccaacttttaacactggaacatgacgtatttgtacattcctagcatttcaagaacacgcctggaaacccctaagacagaacccaaaccccacagtttactgcacaaactgaaagaaagagcactgctaccttgacaccttttaaaaaaatcactacactgattatttacacactacactttctaaaggagcatggatattgttattgttctctacaagtttttataacaaactacttcaataaacacaaatgcaattacatcatgtgcagattttacaattttttaaatgtcagattcttttcttattaaaccaacttcatagtaccaaaactgaaaaaagattgtgtatccaaacattatttcacataaaatgtattttgataaagtaaattcccaaaccatggtgctcagaggttgtaacagtccatgtaagttgaagaaaaagagttatcaatcaatacgtgactatcaatcatttatttaatcattatttagttttcacatatcttaaaattcagtagaagaaccagcactcataaaggtggccattcctatacctgccatcgattacattattttacttaaatcaagcttatattacatctgacaacattccttgttaaagaatagaattccttaaacagggcaatattacacatctattagaaatatgcagaaaaaaagataattataaaactcaatttggaaaacattccaggaacataagtccaagatcatcatttattctgaagaaacgaatttgttcagatttatacattttgcatgtatttgatataaatattaattctgaattttcagactgaagctggtttaaattaaaactcaaagcctcaagataccataaattaacatacaaagggacatcagataagcaaattatttgtttccttctctgaaatttctaaaaataatacattagaactttcatctaaaaagctggccatttcaattgttagaaaagcacaggttcaaaaatatttgtcacaagagaagttattccctccttgatggttgggggagaaagtcatttcagtgataaaaatgagtttgtatttgtaagcaagattatcaattccagttaggccccatcaggctacatggaaacactgaataaattacggttgaatgaatttcttggacaaacttcagccagtcattttcagtttcttcacaaaaacaagaagcttttgggaaaacaagataattttgttaggagaaaatctaaggccgaacagtaatagaggtgtctacaggaatcaaactgttcaatgacttacattgcctgagttggttttctttttttcttttttttttttttttttagtacacaggccatattccatattaatattatttcttataatcctcctgaagtaatcactatgaagagtgtaaagtgggtcttttcaggacctttttccccatgtgtgtctttttttcctgacaaatggactgtggtgttttcctctcctggcccctcagccatgtataagagctgtaagagtgtacaggtcacatgtgaaacttcagtgtttctggcccctgaaggcagagtaagaaaagtgatgaaattgcaaaaatccaccctaagagtgctctacaaagacacacaaaagcatatgggaatataagctgggcttcgacagtcgaaagtgaaaaatgatactttcacggctgtgtcattaacacatacaagagaagcccaggaacaccaccgaaggctgttcccacccatgaaggacctgcatttctccatgtctgacacctatttatagcagacatgatttctgcagacaagtatttatgcacattagatatgcattatttaatggtactactacaccaaaatgggaattttctacgaatctttgaataggccctcaaactctccttcccttcaataattacgttcagttttaaataacttaaatcttcaactttaattgaaaacaaagcatctctatttaaaacctctggatcagagtgttttactgtcttaataaaacaagtgactgaaaggaagactaagagagacttcctatagttaaccaagaagagttgaaaaagctttaactaggtacatctcagcaaaagtaacaaaccaatccactcttgaaccccctaaaccccagctccacccactccagacagacctgtttaacaatgtcagtgcagggccaggtgcaggggctcatgcctgtaatcccagcactttgggaggacgaagtggggcggatcacgaggtcaggagatcgaaaccatcctggctaacacggtgaaaccctgactctactaaaaatacaaaaaattagccaagcatggtggcgcgcacctgtagtcccacctacttgggaggctgaggcaggagaatcacttgaatctgggaggcagaggttgcagtgagctgagatctaccactgcactccagcctgggccacagagcaagactccgtctcaaaaaaaaaaaaaaaagtcagcgcgcatgcagctgtccttgctctgctggtcccaggcaccagctgcctggtctctaggaacaacacgtgattgtgtgcacacggctcctattccacatggttttttgttgatgtttcccattatctgccaaggagactctagaatccttcagtgaagaactgcgtttcatgactgcatgcgtctcccacgctaatatctgtgaccttgttctaagcaggaaaaggtgtgtaacaagttaaacggccctttctgctgggaaggtagcagttggaatagaagcagcagctttgacctatcaagcatgatgttttgaccctcatcccacagctgtgaggaaagaacttattgaaagaaaactaggtaaaaaaaaccacaacgaaaaggatctgttgtgactaagggcagtcttttcagacaaatcgatttctgctcaaagccacagaatcagaataaacagtccctgttcatgtacccagagcagaaacagtgagccgtgtcacttcagggtcgggtgaggcctctgagatgtcacagatccttggtgcactcagcggctgatgtagccagtaagacccaatgtcaggcactgagcccagaagccaccaggaggaggacaggccttcattcaactggctcctctgggcctccctacagacaggaggatgatggtggagaggacaggaggctgacactgtgccctgcacaggcccctctgcaacgcagatccccaagaaaccccacagtgccagctgctcagcccgctctgatgtcaaccaggtgagggctgtcggggctgcgtcctccagggcccacgtcccactgcagcaagacaaggccccagacaagctctgagaaagcctcccatgcaacccaggtcacactgctggggaaccggcttctcagggctcaggccaggggtatgggtcaccagacctcaacaagcacatgtcaacagctctgagccctgggctgcaaagacatacaagagctaagaaaggtgacctctcacggagccctcagccctggacaagctcaactgctcagcttccacagggaccttcttccatataactgatttgggggcataaaaaccatgttaacagtccccaatgttgtcaaggatctataagacagagtcaaaaactgagtgtgcctgtagattctgaggccacagcctattctttcaggttctgactgcagcaggaaaagctttaaaatgtgctttctaagcaagttaagactttacagttctcatggaggctcctggaactcctatgagtacagtcggcagcaattactttgtgaaatcagaaaggagcttaaacaatacacttactgagcaccaactatgaacctggcaaatttcttggtgtaaatctgggctgctggtgagacccaactcagggaaagcccatctccaggtgcagaagcacagcaggtgcctgcgctggtggtgggcttggggactccacacacaggtggttttagtccatgcactcaagttgacacaacgtagctagaaaagtacaagctcggtcatttcctgttaatgaggcctgagtggagggttttcgacttgaaaacaaaggaattgaagggattcaaagtaagatgaaaagtcaacttcaaggccaggcgcggtggctcacgcctgtaatcccagcactttgggaggctgaggcaggtggatcacctgaggtcgggagtttgagaccagcctgactaacatggagaaaccctgtctctactaaaaataaaaattagccaggcgtgatggcgcatgcctgtaatcccagctacttgggaggctgaggcaggagaatagcttgaactggggaagcggagattgaggtgagccgagatcacaccattgcactccagactgagcaataagagcgaaactccacctcaaaacaaaaacaaaaacaagtcaacttcaccagagccccatcttaatgtggggacaggttcttaagtctaactcaaaagagatgccgagaccttgcctaatcaatattctatctcaaaatatcttcaaactgcccagtagtaaacagattgctattgttttggtcccctcaaagatgaagtagctggcttgtgttcaagggtcataaaagaccactccctcttccccaaaaagaaaggaggacctgtaaacattggaattacattcaatgcagcaagatgctgaccctggacagccaggagttgggaccaagagaagagcagactcacacctccatttaatgctcattctctcacgcgttcatggagtggaatggaaggtacactagcagcccttttcaagtcactcactgtccctgtgtgtgtacactttctctctcccccctcctctctgtgtgtgaagtgtcttatctgtttctctctctctctttctttctttctgactctcatcccctctctgtgtgggaatacagcttgttctttttcactttctttttggggaggccaagggatggaaaggaagacaaagagaacaaacaatgtaattggacattattctgtgattaactcataactctacattttggcattacataatctctgaaaccactcacagggcatatattatatctgttatgactaaaatgtaaaataaagaagaaaatgctgactgctttgagagccctaactcatatttggatgcaaacatctgaaaattagccaaggaactgacaaaacacacaagaagaacatggttatgacactcaaatctaacacagttgcacatactataatttcagggcaagctttcaaaaaacactcccttccttctaactgcagccaaagatatgagtgatggaatgtgcacatccaaagtgaaatgtcataaccaccacgacccacacctaggcacatgcataagcccaggcgatcgtgttccagactttctaggctcagaggatgacacgtcatcttcgcctggctatatttttataagactccactttcaaagccaaatattcttttgaattatattgatctgagatacccatcttttttttttttttggagatggggtcttattctatcactgaggttagagtgcagtggcacaaacacagctcactgcagccctgcagccttgacctccttggctcaggggatcctcctgccttagcctcccaagtagctgggaccacaggcatgtgccaccacaacaagataattttcaatttttgttttaaacagagatgggatctcactttgttgctcaggcttgaactcctgagctcaagcaattctcctgccatgacctcccgaagtgctgggattacaggcatgagccaccgtgcccagctgcccatctattatgaactgaattgtgttcccctctcccgacaaaaaaatatgtgaagtcctaaactccagtatgtcagaatgtgaccttacttggagatcggatctttattggattaattaagttaaaatgaggtcattagggtgagccctaatccgagatgactaacgtccttataaaaaggggaagtgtgaacacagaggcagacaagacgcaaagggaagatgctgtgcagacacacagggagaaggccaggtgaaggtgcagggctggactgatgcacctgcaaggccaggaacacctgggcttccgaagccaggaacaggcatggagcaggttcttctctagagcctttggggaggggggtgtgaccctgccaaagccttgatgccagaattccagcctccagaactgtgagacaatgagtttctgtgtgtcaagccatccagttcttggtactttgttatgacgtcccttcaaaactaacagaccatacataagccctctgactgaaatagtttaaagtgttatgtgggaagattactgattccaggaagaaatgatgggcagaggtgggtacacacaggttgcctcatcagcttcatgaagagtccaaagttgctgcaagccctcttggtggacagagtctgctttctgctctaaagcccaggcagaagaggtgctgagtttacacgttgtgccctaatctgccccactctcctgggatttgcacagccatgatgaaggaaccaattcacaataaatgcaggatgttcacccatgctacgtgggaatactttccaaactctggcaacttctctccccaaattattcccttttcctgttgagagatactgcacaggagcttagacaagattttcatttagtaataacgggatgggatgatccatccacaagaaataagctcaagcacatactctgctgtgtctttactacagagtattcaagtagtcaaatgccagggaccagtgactctgtgtacatattaagtaaaacctgattgggaaatctctaatacgtccattcagtcaacatttattgaattcctgctacaatttaggtgaaggctcagcacatgcttctgtaaagggccacagagtatggattttaggctttgcaggcaatatatcctctgtcccaagaatcgccaatgctcaatgctgtcccagtgagaagcagctgcagtcggtacagaaacgagtgggtgtggctgtgctccaataacagagctgcacttggccttagccgttggggagataaggcagccctgccctggagtgagtggcttcatcacgcctgagagacagaggccagaaagcaaaaagctttgacagccacactgcgcagcactgatgggcctgaccaggatggacagagaggcagatacacctgtgtttggagcaatataattttagagagtgaggcagtgaaaaactggaaaacaaccaaaaatttaaaaatgaaaaaagaaagtggagagaaaaatgacgaacaagaaacaaacaaaaattccacgcattacagagaggagtggttcacgacaccagccaatgttgcaggtgacatgaaaattccctacatccttcaaatatgattttttaaaatccctgtgaaaagccaaatggcctataaatgggtaaaagaataggtctttaagccctcccccaaaatggggaaagaggggtgttaaattcttccttcaccacgatctctatcagccatctaatattgcagagttatgaggtgagaataatgtacccaattggtgcggtaatgaaaggtccctgggcagaaacacaggctccatctgcccatacactgtggacatctattttaacaagcctgtgtgtgatttactgccccggactctcatattaaacattttcaatatcttttagcagttcaataaaacctgttaaaattaaattccaaccacaactcactcatctacaccttaggaggcaaaggttatactaatgtgatctctctttatagcccttgacaagaaacaaaaggaagtctttcgctctgcatgtacaaaagtagtgatccaaaggcacaaaggggggtatttcctcaatctacacgtgtatgtgtgtgcatgtgcacacacacacacatacacacgttaaggtcaatgaatccagatttgggaataggttttgctgctcagagtgtggctaaatgaaaactcaagaaagatcacttccaatctgctagacgaaaacctacaaagagggcctcagttgcaagtttcatatgtatgtacacagactgatcaaaattaatattgcactgcattatttgagacccattaaaaagagaccacccagtggctaaaatgtttgagataaaacacttcatctggttgtcataaccctttgtttagtgacttatttaaaacaataaacactaaaatattcaagacccgcagcttttattaggagattttaagactgtttttgggataatctgtcattttctgtaggtcagtggtctacagtgttaatttattcaataagcaaatattacagatagaatatgcatagatattaagtatatttcatatatgtagatatttatctaagtatctaatgtataacaaaacaaaacacacaaagaatacatgcagctgtccccaactgtggtcagcgaaacacggcctgtattactgatgaaaacgtgtagcccctacacaggctgcctaaacttagggcctatcaaactagaagagggagggagagaggaaatggagaaagtgatctaaaatcaccgacatagcaatggtactcctggagtttagaaacgtaaagcatttcaactccttgtgggcctgcacttactcggcatggagctggacccttgatcaccaaaactggaaaaacagattcccttctgcatccacgaccaggccttgcctgatttcaaggaagtttaaacaatggtcaaaacaccctgcccagatgtggcagagactcctcctgcaggaatgcagcttttcacatccaggttcccaacctccaaacacccatgaccaactatggccacaagtcccgaccagagcatcctagtccacccttatcctccctctctctctttttttttttttttttcttccggagacagggtcttcctctattacacaggctggagtgcagtggcacaatctcagctcactgcaacctccgcttcctgggctcaagtgatcctcccacctcaacctcctggagtaactggggactacatgcacaagccaccatgcctggctaatttttgtattttttgtggagtcagcgtttcaccatgttggtgtctcaaactcctgagctcaagcgatcctcccaccttggcctcccaaagtgctgggattacaggcatgagccactgcacctggcatcttatcctccaaggctgtgctaggaggagcaaacacacatagtgatttctgtaaacagatttatttatttatttatttatttatttatttatttattgaaacaaggggtctccaggctggagtgcagtggcgcaatcatatttcactacagcctcaaactcctgggctcatgcaaccctgccacttcagcttcccaagtggctggggctacaggtgcatgccaccacgcctggataactgtttaatttttttgtagagatgggtcttgctatgttgcccaggctgctctcaaactccaggccccaagtgatccgcctacatcagtctcccaaagtggtgggattacaggcatgagctactgtgcccagcctagatttttcttttccagtatcccaaatccacaagtcatcataattagcagaagtgatcactgaggcaaaatgcccatgtgattacctttcggggtgtacccactcagcccctcctctcctgcccttcaaccatcaatccaacattttcccctcgaaatgtggtacaaaaacacaatcacatacggcccgaaaaggtccgtgacgtcaaggcaagtacattgattgaagtaacatgagagagaaggggtgggtgtagcaaaaacattctcaaggccaagtcatcagcccttacccttaggagggggcagtgattaagaggtggtatgagagcctcgtttctcatttctataagtgctggtaaaggacctgaccccacttccttacctactgcctgcccaggtaactgatgcctacagcatcacaggaattgccaaaatgcagaaaacaaatcctaaattgctctaatttcataacacaaaggctggtttttggcttgaaataatcaggcaaatatataatgttctgtcacccaggctgaagtgcagtggcacaatcttggcttactacagcctcaacctcctgcactcaagcaatcctccaacctcctgagtagctgagactatatgcacatgccactatatctggttaaattttttattttctgtaaaaacgaggtcttaccatgttgcccaagctggtctcaaactcctcgcctcaagtgatccacctgccttggcctcccaaagtactgggattacaggtgtgagcaccatgtccagccgccgctgaggtcttaataggtggatgttttgggttttttaagtgacaaagttgtccatttttaggtctctcgtattgatgtttaattagaaatattagcctgaggccaggcagagtggctcacgcctgtaatcccagcactttggaagggggaggcttttgagatcagcctggccaacatggcgaaattccatctctactaaaaatacaaaaattagccaggtgtggtggcaggcacctgtaatcccagctacttgagaggctgaggcaccagaattgcttggacccaagaggcggagattgcagtgagccgagattgcgccactacactccagcctgggctacaaagcaagaccgtgtctcaaaaagaggacctcagcagtggactccctgctgacttcagcaattccattccctagatcacccccatccctaatcctaagaagtactcccagaatccagccccatcctctgcgctaaggaggccaccacaaccttcacacgccattagccaggggacagtggggcatcacttttctcctaagcaaatcagtcccatgtaggacaaaggaattaactttggttttaaggggctggcaaaagacagaccagagaagaacagtatctcagaagaaggtatgaacagttcgatgtaggtaaacacagataatactgccaacaccagctcctctggcatctgtaccaggtagatacaaatcagaaatgctgcttttgagagaaattagaaatggggtagctaaaaatgtatattttgaaaataagaatcttatgcagtcaaaagcttattatactgattatacataaatacaaagcattagtagcgtacagctctagaggataaacccagcaagtcttaccttcatcaaagcatctgtaacactccaatagattcaaacagaaggaatcaattatcattccgattgtgatttttctaatgcatggttggagtgtctttacttcccgttggcttaacagagctccagtggccacaggtggctcggggaggaaccgaggaggctgcgcagaggctaagaagggaggccaacctgcaggccaaacaacagagcggggctttcacccccaggggctcgcctgacttggaggctcaagatttgagatttcttaaatttctcttgtatattgacaagttatcattgaggtacaaaagtgatgttattgtttaatacaatgtggaatgaataaatcaagttaactaacatttccatcccctcaaatattcaacattttttatgatgagaacatatgaaatttactctcagcagtattaaaatgtacggaactcaattattagctacattcactacaccatgtaacagagctccaaaaaaaagaataagaaataaatcaaacctatgcctcctatgtaacccaggctttgtgccctttggttacgatctccccaacccccctcccaaccgctaacctcccaacctctaacccccattcctctttgcttctgtgagtttaatggtttcagattctgcgtatccgtgaaaacaggcagtatttgtctttctgtgtttggcttatttcacctaacacaatgttctctagttccatacacgttgtcacagatgacagaagttcttcctgttttatgactgactagtactgcactgtgtatacagaccatttatccatccgtccaacgtaggctggtgccgtatcttagctacagtgaacggcgctgcaacaaacacgggtgtggagacatctcttcgacatattgatttcaaatctttcaggtaaacacccagaagtaggattgctggaccatatggtaagttctatttttaggtttttgaagaacttccatgctgttttccataatgtctgtattaatttacattcccaccaacagtgtatgagggttcctttttctccacatcctcacaatactggtcattttgtggggtcttctggataacagctattctaacaagagggaggtgacatttcactgtggcttcacttttcctttctctagttttgagagttttaagtagaaggccattagcgtccattttaacccctattccatactcaactacattgacctgtctagttccagcctgagtcctctgacctgtccctttcttattcaaaaggtaatcagtaacagacccaggaagctacacaatggcaggaatagatgacactagaagatgaaactccttcctaaaggaagcagaactggaagagcactatttggggagaaccctgggaatagatccaaggcggcttgtttggaaacccagaaaaaataggggagttgtgagaaattatcccctaattactaaggagctgttaacagatgaagtcaatctacatttgctgatgcggaaacttatccaagatatactggcagaacagtacgtatagcgggaaaccatttgtgcgtgtgggtgtgcttaaaatgctcatatatgtgcagaaaatttctggaaggatgcgggaaaaaaaagataatgttttccctccaggggagggaaggaatgtggtattcaggacatttttatttattttccagtttacacacttctccattttctttcccattagcatgtactactgctgttataactaaacaagaaatactcaggctttaaataaacagaagaaactgaaagcaggataggtacaaggttttaaagaattgttccattcaataagaaggaaagaaacaaaaacagggcaaaaaatgctcttacatgcacaaagaaacaactgaaaacaaaagtaccttcaaatgaaacatggagacagctttggctttttgctgagaccctaaacttggtgctttcaaatgtattacgggcagaatgaaagctgcaaagtaccatttccagaactgggagctttttcagtttgttgggtgatttctagttaagattgaagctggagtgctgggaacaaaaggcatcaaaaagcaaacagggggaatctgaacatgaatgaggtgaggggacagccatgatggcatcaccacaggcgaagcaggagtccagggcacagtggtgcttcatgtctagcgtccacctgaagaatggcggcctacactgggtccccaaatagtcactgtgtttcagagcacacccagatggcatcacgatggctccactgaaaacactgctcaaaaccggagattcacttctaacatgaggttatagaaaaatacatatttaagacattttcaaaggaggaggagaactggagaaatgcagcgacgtgttcaagctccatggatgaattcaaggcttctccccatgggtgctctcagcccaccatgttgccggtcttctgattctatttgcagataaatgctaaaggcataggatttcaaataggggtagccagaaagtattgggcaataagtcagcttgtggttacctgtctgagcgagagatgccaggcataaggctgagggcttgggccctagagccagagagtgtgcatttggggctcagctccttttccccacatgggaaagtttcttaactttcctgcctatcctgagggaccacaggggtacgacaatgacggtagtggtaaggggtctcaatgtgacagggttgctacagaactaagggagatagtaaagcactcagaacagcacccagtacgactcaaatttatatgcctatgactctgaacacaccaaccaagtctgctaaatggtccattccttgaggttggtcaactggtatgtagaaaacactcgatgagatacttgttttagtttttcttctttgctattcattcaatcttaaaggatgatgtaggaagagaaaagaacaagtgagcacctaccggtatgtcccagaactgagctggacttctataaatacagtagaactttctcctcacatttgctgtgtgagttgatattacccagattaatagacaaagtctgggaaggttctggaactacttaaggttgtaaagctgacagtgtgtgggcagactgggtctttaatcccaggtcaatgagaacagagcctggacacctcccaccccatattccctccacagaatttttttttacgcaaggataacttttcttaagtaacttttcttctattaaaaaaaaaagaagaagaagaaagaaagaaagaagaaaggaaggaagaaggaaggaaggaagaaggaagaaggaaggaagacggaaggaagaaggaagaagaagaagccaaaactcttcaacggtttttcatcccttgcctgaaggatagatttacgcatttgcatgtgcccagggccctcatcagtttaaaccaaaccagggccagcactccctgtacacctgcagacaaaccctcccctgcaatccacggagacccaccctgtttccaccctcttcttcccaaatctctactttccctctgtcatccaaacccacactgctgcctcctccatccgggctcggggctaacacccctttgctcgctggcccttctgaggccagacactctctggcgttaattcactgggtgccccctgtccagtccctccaccccaccacaaaggccgctggcgagaggctttggaagcacaggacacatgaacccagacagttaccgcacaggtgcttctgcggggtggaggcatggaaaacgaaaatcacactgcacctaagtcacctcacgaagagtcaaagtaaccatgatgcttacgatggtgtgctagttcccgtcaagcctaatgttgtcacccaattagaataaattgatttccttcataatgggctctgtctccacgttaatttgactgcatgcgctctaggggaggattcatgcctggagaaaaggtggggcagggcgaggaggcccacaggaaagacccgatgccgtgacgggcagcaggagggtgcacagctgcacacgacagcaatgcacggcttataaaaaataagcacgaaacaggaaaaccaagaagggcaaaggaattgtgcagttcctcctagcatcaaaaccttttaggcaaatgcctaccgagtcttatccattcacagctctgttacggagcaagaaagttgagaataaggcatgaacttaaaagaaaggaacttaaaatcaagatgactgcctgagacatgttgcacaactgatataaaaacaaatctgaaagtacaattataccctattgcaaggatttaaatagttaagtggtccggtttagtgcctgctttatttccagaaatcaataagtaaaataaacctgttagccaggactccatcaggtgctatgagcccagttttgtgcaagatggataaaataatccatgtgcctttatttgcaagtattttccattcttttcaaaaacaacgacaaagccagcatgcaagctttttcccaactaactcctcttatttccacacctcataactattcaagggatgaaagaaaaaagactccttatcaaaggcctgccacatattttgaatgttgtacaatgagaaacgtccattaacgtgagagctcacccccatccacaagtgttagttttaattacaagtgatcctgtgtatcaggccctgctggagagaccagtcgcagaggctccgagaatttcccggatcgtgcatttgaattcactacaatgctttgtcactgggggtttcagcgttcagtaataatgtgctttgttctcaaaaatgccccccacacctgccaactgaaaagaaagccaaggagacccttgcaggctggtgtgcaatcacgctgccccccagtgggcactgccggtacagcagccctaaagaagggcagagcaaatggggaatcagcacctctgcatcaggccggcagtttggaaagcacctgtcatcagtgagttgaaggagcaagagaaacaaaaacagaagtgaacctaagagaaaaaccaagtgatctcttctacaacttccatgcacatcaaataattaagtttgcaggcgtgaaatatattcaaaagccaggtatacaagcatgtttacacagtacttaaaacttttacataggaaaagctgaggcaaaaacaactctgtatctgcaagtgtacacataaacaagacacacggactgtgcacccgccattcttacagtggagaaaactgacaattcagtccacagaatataatggctgtgatagtctggtagacaaaagaataaccaaaagataatttggacattgtggagagtggactaaaggaggctgtgtgattctccacttcaaatgcaatcatttcccaggattcacagcaaggaaagaaatacctgagatttcagaaaaattaaaaattcacagtaagtcatgaagccaccaataagaaactgccatgctttcttcttggttacacatcaaaaattaaacattttcccctaaattcctaagtactgagatttcctttatataactcaaattcaaggaggagaggcaaagtagggatccagccatgtgtcagtaacagtccccaattagctaaaccatgctaagtagctaactgcaaaatgttcagtacatctaggtagcaggaaacagcaatatcttctgtgacaccttacaaatgctattatgacacctatgataactttcatgacaacattctaaaataaaatgtaactatttccacatcacactcagacccatttcctctgggaagtgcaggcgcaggctcactcagctgccagcaaggatgctcactcacaaactggcagtgccctctgctggacagtccatgaatcacacccaaacaagaaaagtactgctttccatttctgggtattttgaaataaaaataccacaaaacagctcaactatttatccttaatatagtcccttcaacctgtctggcaaaaccacgtaaaaatcttatgctttcagcaggcttgctctgatgtgtaaatcagttctaaattgagttcaatcctccacaaacattctttgtctttgttactatatacgtatgatttatagttctctctctggggaaataaaattaagttctttcacaattcttagaagagaaatatgaaatacggctctatgaagttatttcaaagatgacttctaactaggcctaggatcctcatgccattagcataatgtctaaaatttcctctgttctcaaattcattctaatctatgaaagaagatatgagtaggcatgaagatgtataaagatgataccaaattacacctgggtgcagtggctcacacctgtaatcccagcactttgggaggcctaggcagatggatcacctgaggtcaggagttcaagaccagcctgaccaacatggtgaaaccccatctctactaaaaatacaaaaattagccaggcatggtggcacgtgactgtaatcccagctactcgggaggctgaggtaggagaatcccttgaacacaggaggcaaaggttgctgtgagcaaaagagcaagactctgtctcaaaaaaataaaaataaaagtaaaaaaaaaataaaatacataggaaaacacaaggaaaaaaaacacgtttttaaacaaacaggaatgaagcatttcatgccctagggcacatccccgttagtgtggtggaggatgagaatcaaatctcagctttaccactcactaatggtcttgaggctcacatcttattaaattacaaaacacggaaaacagactgggcactgtacctcacacctctaatgccaccactttgcgaggccaaagcaggaggactgctagaggccaggagctcaagaccagcccgggcaacagagcaataccccatttctacaaaacatttaaagaataaaaaattagctggtggtacatgcttgtacctgtagtcccagctacttgggaggctgaggtgggagaactgcttgaggccaggagatcaaggctgcagtgagctataattgcaacactgcactccagcctcggtaacagagtaagacacacacacacacacacaccacacacacacagtaaaagagcagatacctcgcagagtgttatgagaatccatttatgtgaagcacctagcacatgggttatattcattaaacaccatgttacatacaaacatagataaaagacagacatgcccttaatttctctccataaaacctcccaagattctatattcagaacagaagaaaataccaatccctctgactagcagtctcagtcttcctcttgtacaactgaagaaagaacaagcgaggctacagcaatgagggtggagtgcaccatgacacagtgaggcccacagcaactgcacagcacacctgccccatccctgggcctggaggctgcaggcgtgaatcctacaagagcaaagggtctgggcaccctgaaacgttctttaaaagattctaatactcagtgaagctggaactgaaaatcatatgcaccttttaaaaggcatttttggctgggcaccgtggctcacacctgtaataccagtactttgggaggccaaggcaggcagatcacctgaggtcaggagtttgaaatcagcctgtctaacatggtgaaaccctgtctctactaaaaatacaaaaattagctgggcgtggtggcatgcacctatagtcccagctactcagggggcctgtctaacatggtgaaaccctctctatactaaaaatacaaaaattagctgggcatggtggcatgcgcctatagtcccagctactcagggggctgaagcacgagtttgcttgaaaccgggaggtggaggctgtggtgagccaagaaagcgccactgtactccagcttggacaacagagtgagactccatctcaaaaaaaaaaaaaaaaaaaaaaaaaaaagcacttttagggaacacaatttgacaacacctatccaaactttaaatgcacactcccttttacccagcaatgccattgccagctatatattctgtgggatgtattcaaacaaattcactgcagtattgtgttttatgggggaaaaaagggacagggagggagggaatgtgatatattaataaacatgtaataattttcatcaaaaaagggtggaatgagtttagcatgtgctcatcaagaaataaatccaaattataaactaaattttcaaaggaaaatttcagaagagtataccttagtagatttgtttaaacatttacaatttccagaacaatatacacacaaaagtatttgtgattaattctggggagttaggtgggggaggagatgaaaggcacttccagtttcttccctacagctttctatgatgtgacctccttaccacgaacacactttattttataattaaaagaactccgataatgaactcttacttgaattaaacacacacccaaggaggccaacaaggaaatcacagaggccaaaaatgtaagccaattaaaattaaccaggttctccctcccggcacctgcccgcaccctgagctgccggggaagcctggaggagggactggggcttggcctatctttgcttcttcagcagaaaggcacagtcctacctgggctaacgtctgcaatggcggaacctgaaagtatttgagccctgcattctggtctttgactgaacagtggtctttactggaagattacatactagtaaaaggcactgcatgaaaaatctcagggcctggaggaagccttggcgtgtaagaaacaggaggccattctgcacacagccccagcccacccaagtcctcatggcccagcaccccctcaccgatggcctccgcaggggaggcaacatagttctccacatggcggagcaccacgcatggctgggtgagctgtgccgcagttcatcagtcctgagcctgcccccattcgtgaaatgggctgatgacccactggctgggaggcatgcgcctcgtgggaacagctcagtaggtggtggctgacagaccatggaaccctgtcctgcacgtgaaatacaggtgcatgaggcatccagaagggagcgtggaggagggcacaagggtggaggtggcagaggagaagaggcacggagcctccccaccagctgtgcttgactagaaactcccaggctgtaaacaagactaaatggtaatgaacacctaaggtcccagggccgaggggtagcactgggacactgcccagagcccaccgggggcacatcacccctgcgggcagtatccactcacctggggcccctcgccctgtaagcacggcccctgtccaccctgggcccatacctgggtacatgggatccccgcccacccaaggctcatggcccccatgcacacagtccctgccttcctgagcctcctgccctgcctcgcaccctctgtcatcccttgctgcttctgtactctccacctccctctctccactcaatccttccaactaccacgtcaaagggcccagctgtcatgaatctttctaaaaacattcttttgctttctacaccctctcaaatgaaagcccgcccttgaccctcctcttccttgatccacccagccccatctggccctgcctctcacggccttccactcactctgccccacaccctggctctgcctcaccagcctgctcttcctgagaccctgagtcactccacctggcggagaacttccaggtccatttctcctccccaggcctctcctaagcccctagtttgattacctgcacaaactgcaatttgaatgccacatggcacccccactcggcatgccccaaatttgctaagtgactgcccaaatgtcttcccttctctgtggtacccatgataaaccctgaggacagctacctagacggccccctccccatgacccccacgagagcccttccaatccacctccctaaatagcatctctcaaatctggccactttgccctctttccactgctggtcagagctacccacacctcctgcctagactacagggcctcttacctggctccatcacctacagtgcagccagatgaccttattaacgctcaagcctgatcactctccagcagacccccagctctgtggcttcccattgccctgataactgactgggaaaccttcatatgcccagaagggcctttgctgaaatgctcccccatcagagaaagtggacttggcctaagaccctactgcacacatccagtgttctatcctgccctgtggactccgtcacactgatctccacctgaggcggcaccatcaatccccccacaacataaaaatcacaagcacagaaggcagcttgctcgggaacctggaatcggctgggtcctgcagtcactcagcgtctgctggctggagggacagaaggccccacggctctcactggctcacctggagccccctcgtcttgtgtctaactctccctttatgtgttctgtggtacaacttcagctcctaactgtgcgtcctcattgcctcaagtttacagtgtgagtgccatcagggcagggcctctgtgtcctctgcctcatgtctccagccatagcacatgaacagaaccagctcagcaaacctctgtccagtgaaagtcagtctacatgcattacaatagtgcctctatggccaaaatacatcaaagcatcaattactcacagaaacataaaacgaataatagaacaggcatcaaggccttctgtaattgttagtgctttgttatgtataaatatattaccatagagaattcctttaattcagagcattacactttaaaacagcatcacttctcatgtaaatctaaaataaaattataggtcaggtgtggcggctcacacctataatcagtctgagaggtacaactggggaggatcacctgagaccaggagttaaaggttggcctgggcaacatagtgagactccatctctaccaaaaaattagaaaattaactgggcatggtggtgcgcacctgtagtcccagctacttgggaggctgaggtgggaggcttgcttgagcccagcaggtggaggctgcactgagctatgattgcaccactgcactctaccctgggcaacagagcgagaccctgtctccaagtaaacaaataaaaataaagagaattacaaaacacacaagagtggaagactccatggagggatgtgtatgtgccttcgtgtgcacacatgtgtatgcgtgtgtttttcagatttttaatttactgcttgcataaattttttaggctgcaaaatactacaaaactgtccactgtgactggatactgaactctgaaaccaatacaacacagaagagactagaaacaaaattcaaaactatttatccctgcctgccctttggggcttctagagtcaaatctgccagcaacacatcttagtgcctaagactgcagcccaggggagacatctgccctgcagctgaaaactgataaaacatagagagggacccaaaggacacaaagtctttacccagctcagtgggacttttctaagcttaatattttaaaactgcttcatacaagcagcagctaaatcccaagggccagccccacgctccgacagttctctgaaatgctatgacattaagtgcaggcttattctctggtgccacagcatggctggtgccggctgacatggcccagggcagctgcaggagggatttgtgctcaaggtttcaggcatgttaaacccttcaaccactgccagtgcacaggaaatcccaaaattcttaactggtggcttatttcaagaactaatctagggaataaggacaaaagatgtaccttgacagtctcactctcatttctcagggtcatcacttacggggtataacaactatgaaaagcctttatgtttggccacatcttagtgactgatggagatcagaccttaatttagcacacacaggtctgctaggacaagagcattctcagtgacaaaaacagtggaattcaatttctcatacagtttatgagttgtaaggaatctaattgctgaatagaggtaaaactacatgttttatttatttattttagaaatagggtcttactctgtcgcccaggctggagtgcaatgatgagatcctggcccacttcagccttgaactcctgggctcaagcaatccttctgcatcagcctcctgaatagctgggactacaggcgagtgccaccacacccagctaattttttatattttgtagtgatggggtctcactatgttgcccaggctggtctcaaactcctggcctcaaatgatcctctcgccttggccttccaaagtgctggaattacaggcatgagccatcacacccagccaacactatttttattttattttattttattttatttttattttattttgatttattttattttattttttggagacacagtttcactctgtcacccagactggagtgcagtgatatgatctcggctcactgtaacctctacctcccaggttcaagagattctcatgcctcagcctccccagtagctggaattacaggcgcataccaccacgcccaactaatttttgtattattagtagagacggggtttcatcgtgttgaccaggctggtctcgaactcctgacgtcaagtgatccacctgcctcagcctcccaaagtgctgggattacaggtgtgatccactgtgcctggccaagactacatattttaaatgagcaaaataaagcctctacattatgctaaatttacttgtaaccctggattatttaccaaattttccaaaacaggtatctcttaccatctgaccagcagacagtatggcttaaagaaaacagcatgaaataaaccaagatacgcagaatctagaagtcgctctgcagctgcggctgggagcaactaagtatctctgcaggtgcctgttctcactgggatattaagaaaccaagcgttttaaaaagcagacatgtggacaaacgaaaggttatcagctgatgagcagatttttagagcaaattattaaaacgtgttactatatctgacatgttctaattcttccccgttttatttttagataccattttactactaagagtaaaactccaagctaaaatccaaaatggaaaagaaaatctctttaactgattagctcttgggagaatcaccaggacaacacagaaccgggataagagtatatgttgtaggaactaggccagaacccccaaaacatagcgagacgcaggaacagtcacaaaatagcattcttcacaaaacaggcaagttagaaataactgaatatatggttatcatatgtaaccactcacagtcaaataaattgttttacctaaataaaaaccatcaataactcctcatttttgtttttggattagtatagatgaatgactacaattagctaagcatttttttgtaatcgtgattaagtccaggtacatgaaaaacaaactcaactccctgatgaataatttagaaaataatatactttattactgaaattttgccctaaagctttctctgctgtccaaataatttcccaactgcatttcaaattaaactcctaagttttcacctctctccccagggtgtttttctgcattacaacatattttaatatgtttaaatgatagcaatgctataaagtgttatttctcactgcaaacagattaatatcacttcatacctcagagagcataatagtaataaggtaataaaacaaagcaggatcatcaccactaataacctgagagggaagtcctgctaagacttcatctctatcacggaatattcttggtcattacttagatgggagcgtttcccacatcacatctctaattcagtaattgcttttcgtgtgcgtgagacaaggtctcgttctgtcgcccaggctggagtgcaatagcacaatcatagctcactgcagccaccacttccctgccccaagtgattctccttagtgattctaccttagcctcccaagcagctgggacccacaggtatatgccaccaccttcagctacgattttttattatcattatttttttgcaggctgacagggtctccctatattgcccaggcttgcatgcacttttatataattactgtcttcctccccaaatttccatatacctctgatggtctcataacatgtttgacatcagaaccatacaactcccacttgggtatttattttttggaagtgtgaacatatttgcttttatttcagcaaagagctttattaactactcattcattctgactgctatagtatgctttaaagaaggctttttatacctggaacttcaggatgtctgtagttaaccagaatcacgttttgaagatccatccattattcatcccttcctgtgaataacctcacaatgttcattatttattataaacaacaagtcataagctggagtctaagcccatgaggacaggggctttgtctccattcactactgcatcccagcatctggaagagcacaccgcacacagtagtatgtactcactgaagggaggagcggatgagttaaacagggaaggtcacttcaaagtgtccgttttgcacgggtttcgcaaagccagcagtcctactgataagactccacaaatttaaagttgttctgtattctaacacataaatagtaccagggcagtaacaacgaaaacgttaaggacttttcaagcccacagaaaatacaaaaaatctgtcacagtttatattccaaaaagttctttttttctagtttttctcttttaagctttgctgggctttagactgcaccttttctcgatgcagtcaatgcaccacacttaacgtgtagctctttttttccattatcataacttaaattgcacttctaattatcttttagctaaaatgcaagcaaacataaagcttccctttctatcttctcatccatatttgtagttgctaaggcctatttgagagaaatcgtagggtaggtcagtttttgcaaatattcaaccaagaaatgataaatatatttggaagcctagctttgtattgtttgaagctagcagctggagtagggatatttaagtgctgcttcctgggcccaaattaaaacctcagagaatgggatcaaagaggagggtgcagtgagacccctgacatttcattattcttctctgtacatgtagatatgtgccaattctagacaggagtccaacatacaaataatatctgaagtactcaggaatctgtttataaatagaaatatctacttcatcccgggatcgccatgcggcctgcacatgagtctgaggactgcatttgatttatacaaacagactcaaacctcgtcttaaaatgcatatgtgaaccccagatgcaaacctataaagcccagttgaactgcagagcaactgtaataaatgcaataatgttaagtcagcttcaaagacattcttcaaagaaactccaaaaactttcatgaatgttttatagttatttttaatattgatgtatttcatcttaaaaccaatgccaagagctgccgtgaatggctcatcttttcatgctggtgtgctgcttggagtctctcagaagaccaaaaattacttcacaatactgcaagatctaaaccagtggcccccaacttttttttggcaacaaggaccagtttcatgtaagacaatttttccacaaatgggggcttgggaggatggtttcaggatgaaaccatctggcctccgcctcagatcatcaggcattagttagattctcaaaaggggcgtgcaacctagatccctcacacacagttccgctaacaccgatgctgacctgacaggcggcggagctcagtcagtaatgctccctcccctgctgctcacctcctgctgtgcagcctggctcctaatgggccatggaccagtaccacacagtggtctgcgggttggggacccctgatataaacaatactacacaatgtgaaaatctatgtccttgtatgtgacatttttaaggaagcccagcaatctcagagggccagtcacttcacacatcctagatgaaccaggagtcctgctgttctctggggaatggccaggataaactcattatggtcacttacaaatgaatcctccaaacaagggacaccatcatcatcagttttaaatatggctgtggagctacgtctgctaagcattaaatgaaccaagtttgggagattcctgaactttgatggatttatagccccaaaagtcacagctgacagatgactgtacaagtagccagtaaaggccaggcatgacatgagcatacagagacatgcatcgcttaacaggggcacactcattctgagagacgcatggcttgggcacaggactcacacctgtaatctcagcacttcgggagccaaggaaggaggattatttgagctcaggagtttgagatcggcctgggaaacacagcaaggccttatctccataattaattaaggtaaaacagaaatgtgtgattcagggatttcatagttgtgccatcaggctagagtgcacttacacagacctagagggtagagcctcctacacacctaggctacatggcatagcctcttgctcctaggctacaaacctgtacaacgtgttattgtcttgaatactgtaggcaactggaacacaatggtaagtatttgtgcatccaaacatagacaaggtacagtcaaacatatggtataaagggtgaatgatggtatgcccatgcagggcactcaccatgaatggagcttgcgggactggaagttgccctgggtgagtgagtgagtggtgagtgagtgtcgaggccaaaggcatgagtgtacaccactgtaaactttagaaacactgcatgcttaggctacactacattttctaaagattctttcttccacaataaattaaacttagattactgtaacttttttactttatatacttttaattttttcaactttttgactcataataacacttggcttaaacacacacacattggacaactgtacaaaaatatttcctttctatccttatcctataaacttttttccatttttaaattatggttttttactttgtaaacattgttgggaaaaactaagacacacacacacacacattagcctagacctacacagggtcaggatcatcaacatcactgtcttccaccagcacctctgtcccactggaagggcttcagaggtgacagcacacatggagctgccatcttctggaaacctcctgaaggccctgcctgaagctgttttacaacgggcttttttttaaagaaggatgactctctaaaataacaataaaaagtacagtaaatacataagccagtaacagagtcaaagattgtcatgatcaagcaccatgcaccgtgcacaactgtatgtgctagacgtttatacaaccacagcacagtaggtttcttcacagcagcatcaccaaagacacctaaggactgcactgcaggtcgacactacgacgtcactagacaataggaacttctcagttccattataatctgacgggaccattgtggtttatgtggtccatcactgactgaaatgcttttatgctgcacgtgactgtatttgtatttgcatgtgaactgctaagccaaagacagcacatgcatcttgtggggtgacgaatagggtgtgcagtgagacctgtgtgcctgggcagggggagaactctaaagatgaagtggacatttttttttaagttgcttcaatgattacagaaagccagacaaaaactgagtcttgaggattgctcttagaaattgtcttcataatcaattcacacatgaaggtacacattgccagcacttaggtcagaaagcacaaaagaacactaaaatgaaaaaccaaaaagtgcaaaaagaaacacagtccagccgggcacagcggctcacgcctgtaatcccagcactttgggaggccgaggtggccggatcacctgaggtcaggagttcaagaccagcctgaccaacatggagaaatctcgtccctactaaaaatacaaaattagcctggcatggtggcatatgcctgtaatcccagctactcgggaggctgaggcaggaaaatcgcttgaacccaggaggcagaggttgtggtgagccgagattgtgccattgcactccagactgggcaacaagaacgaaactctgtctcaaaaaaaaaaaaaaaaaaaaaaaaaaaaaaaaaaaaaaggcagtacactggctcacactttggatgcacttcacttcatggtggcgaaggaatcacagccgcccgcacaaggctgagtgtgtgaggaattatgtgttccagcttcactttcacaaaattacatggtcccagcatcactttgacaaaaattagatttttgctccaaatggcaaaaatcaattagtcaaatactttccatgtcttctttttgttgttctaagaatgacacacacgtcctcttaagactagtctttctctcacatactgagcactcacaaccctttgatactccccactaaagggcatgtcacaggctttctctgtgcagaggaagaagcctgcacataaagaagagaaagtgggaaacggatttacaccaggaattggtgaagccccttccctgcccaccagccagacgtgggtgtcccctagacagagactactgctctgggcaggaagtgtggacaatgaagccaaggactgcattttctacagccaaccgcagtccctgaagaggggcttgcagtgaagacaaaaaccataagcactgctgacagatcaacaaaggccaggccatgctggttgtttttttgtaagcgacgttaatacagtatgctggtaagagacccgagctttgcaaaaactgtatcatattagttacttagacccatttcatcatggataacaaggaattttctgtttttggtagaacaaagtggacaatttggccacttatcttctgctcatgctttggatttcgacacaattattttttcctaagaaagctgtaagtgaaattcccttattccagttgtaccatacaatcaccctcctggcaaattttatacttcagagtgcagtcacttcattgcttaatgactggcccctaagaagttccaagaagcaggcacagtatctgttcttgcttaacaagcaatccccactgtcagtcgcagcatctgacccacacggccagcattttttcctccgggttctcactgagctcccaagcaagctggctggaatttgctgttgttagagacagggtctcactatgcttcccgtgctacatctgaactcctgggctcaagtgattctcccacctcagccttctaagcagctgggacaagaagcatacgccactgcaccaggctcgctggctgaaattctgtaaacactagcctctcttcgtgtgtgattttgggacaggttaactactttgctggtccactaccagtcatcaagaagtatgtcaaggagcaaggacagaggctattggctgagatgaaaagaataatggcccaagaagctttcacatatgggtgtgatggggagaggggtcttactttcttaggcaagtcacatttcactttcttcccaagctaaccaccagaacccagaaaacagggaatgcgtctagtttgagaagtttgctgaaggaccacttagatggtgaagccagcagggtagagatgtgatagaaatacgactccaagacagtcaatattcttcaagtaacagacaatagcatagatacggatggatcggcctcacataaaaacaatgcccttactgaaatgcacgctgtttggggaatggatcacatctcactcacacctaacaaggaaatgactgccctctcgcagtgtgctgaggatttccctagaagactccatgaggaaaagacaggcatgcatatacattctagaaaatgaaaatacgttagtgcaaggcagactgcaaccataactaaccaccatgtgaattctttagttataagaaggagcttacatataaagttaacagtgcgtaagtgggttagattttggctgttatataaaaatttgcatttcaaataaacaatgagtagctaaggcaaatggatgagcccggaggacatttaaacggaagtgctcattttaatgacaaaccttagagctctaaaggaagggagggggcacagactcgcaaaaaacaacaacaacaacaaaaaaacacacatgcttaagagaacaaagtgtgttatgtgttagcatggatcactttcaaggatgagaaaggtttggagggtcttatataagtgatagtaatcagaaaaatggtattttgggctgttacaaggactgtattctttaggggggaagcaaattacgttcgaacattaaaaaaagataatatctgagagtagaacccattgaggaaaacagcctgtttctgatactaaaatgtgcaacatgtgatgtccttctagagcccctgactcacatcatgctctcttagacagcaaggaagaatcccactggcttcttccctcacatccaataatactctttcctcagtccctcaacaaaaacaggttcatcacgtttaagcacttgaaaagccatacatcttcacctttgcccttgttttgacaaactttctcttctctgaagaaaaaagaaaaaaatgctcccacaaggaacacaaaaccagcatgtatagcacgagataccacatgaaccatgatgatgaatccaggtttgcaaggtaaagaggaaaagactcagaccaacatcacacttttatataaaaatgcatttgaaactgccaggtgtggtggtgcacctgtggtcccagctacacaagaggctgaggcaggaggatcacttgagcccaggagctcaaggatgcagtgagctatgttcgcacctgtgaatagccaccgcactctagcctgggcaacatagcaagacctcgactccaaaaaaaaaaaaaaaaaatgtatatgaagatgggatttctggccttgatcattccagaagaccctgagatagcctcagcatgtccactggcttagattttgctctttttgacttagattacttggagatgtgattacagggctgaaagagaaatgtttgtgcccatgtacacagacatgcacaccaattatggtaagatgcatgcttatacgttgcttcacattaagacagaggtgcattaacagaaaaactcacaccttgtctttattaattgcttgaatattaaactgacaacctttatacaaacatgaatgtaattgcatggttctaatggggactaggtgtagataaacacatttggtgccagtaaaactgtaaaaaaaaaaaaaaaagttcaaagaactactgtaaacattattccactactggctcctgggaaagaatttgcaaatacaaaaaaatggcaagaataatagctaacatgtataaggtgatatcatataacaatgttttcaccatcacaacatcccatgcaatcggtacaattgttatcatgattttacagacgtgctaaaaggttaagtaacttgcccaaggtcacacagccaataaacagcagggctgaacttcgaactcaagccaacagaatccaaactctctgctctagaatccaagctgcactgcctgcctttctatggaaaaatatctataactctctacagaatggcacaagttcaacagatgaaaaacaaaaatagagttccaggttccacaaaaactcctgcattgctaagttatatcacattgaacacaaaaaccaatcacaatctacttcttacttctccatttcccacaacccatttgccctgcaatcacaagatgctccaagttcacctctaatgtggagctttcaagatcttccatcctacagctcctcccaagtcactctcccgcagacactctgccgtgatatggacacacactgcacctttccacatctatgctttccttaattccgatcaatgtccaaaacaattttgacccccaccttttctgacattgccatcgctccgtgactgcacacacctgttaccagctttccccatctacactcccgttgccttacagtaagaaccattaaattagcacttaaaaattaccttatattcttgttacgaaaacggacgtgcccaggacaaatcctttttctgagtccaacatttccacccaccatttgctgagcacgtcaacaacttttacagtaatagttgcaatttgaacctgttaaggaaacagctactccctttatctagtatcaagtgacttttatgtgccttaacacacttgctctgcaatcctacctgtgttatagttacaatttgaagacgaggtttgttcaaaggaaaaataaacttaacaccctatcaaatcattacaaagtggagttcgaattgtatgcaacataaaggtatatatgagtttctcttctaaggcccccatttagcttttttcacaatgcacctgtttgtctataaattgttctagaatattagttcacattgatttgtgtgttttatgtataacacacaataagcactgccctagcctgtgttactcctgatcatacatgactgtgggtgtgtgtgagatggagagaagttcatgacatcacaaccaaccctggagaaaagtgcagaatggggaggagcataaattaccagcacacgattcatactccaaaactccactctgatgtctggctttcaagaccttccattttatggctcttcccaagctattctctaccaaccccgcagaagagggcagaatgcagaggagagtaaataaggggatgagaacgctgacgaatatagccattgtcccttcctcaagagcagtaataaagttaccttacaagctgtttaaccaagagcctggaggatgacaatacaaagagtagacacaagggggagccaatgggtccatcttaaaagtaactggagaccaggaaattgggcttttaagaactttaaattccacaaacaagccacaaaatgggaatgaatgaagtctaagagtaacaacagatgccatgaaggaaagcagcaaagagcaggagacactgagatttctgatttttaaattcagttctgaactgaattaaaaaaccaaaagaatttttttaatcgtgttcttcaacgtgaactcaaaaacaaacaacatttgaaaaggatgacttgggaatggctcactcacatactagcaaaatgtcaaaattttttatggtatacaaatttgatgttgaagaaaaaagtaaagagtaatttttaaaattccctgcctttgttaaacttacttaacaccactgccccccataaaccacaaaaattgtaatgttaatgggcttctcttagcttctcctatattgtattctacttttaaccttcaagataaaaaaaaacctatctgaaatgcatgtcagttccacataaactgaccttaattccaggaagtgttctatgataaatatattgtcagtaaaggttttaaatattgctactaaagatgtaattatagatgctcaagttttcgtactattgaagtacattaattaaaacttggcacagttgaaatcagagaacatatgaaaggagagtgacgtgcatttcatatcgagggtagcataattattacttttgataaagatgttcggaagaaggcgagagtgctgtgcctgtaataaccttaatcatcattcaatacaaaagaaccaatccatcaaaatccaaaaggatttgcttattgttatgcttttagaaagctcatcaggtatttccaaaagcttcctaatgacaataattaaacatctggtaatggtgacctacttgtggctgctgaacttccttggatagtcttttccattaattatgtacatgctgggaactgagagagaatttacattatgaataataactcagggccgcaggagaagtcagaaaccgacaggggcaactccctgctgtcctcactgctatctgtattaaggccttgttagcgctcttgtatttgggaacagatgctacataaaaattgcaaaagcatcaagctaaggcatgcatgcatcttgatgtaaacatgttgtgaggaaacagccttctaataaacattcaacactgtgcctaagggagagaagagacaagctgtcacattttctactttttactctgtgtagaattacgatctgatgcaaactttgaccctaaacttatcaaataaggcccaggtctgttctagccttggcaattgcataaataagaaaagccagatcacagctgggcacgatggctcatgtccgtaattccagcacctctgggagggctgattgaggccataagtttgagatcagcctgggcaacagaggagatcccacctctaccaaaaaaaaaaaagtcagaaaagccagatcgagaacatgcacactttcaaacatttcatagttccttaaatttcagggtgaaatgggagagaaaggtaggaactgagacaatgatgtttgtattggcctgaaattcatctggtgatgaaataattattgtccaaaaaaaaagtctacttcgatctatttgacaatcacctgataaccatttattctcattggatctgtgtccttccccaaagccacatgattttagtaattaacacatcactgtcacctttctgcttctcagttttgttttgtttgtttgtttgtttgtttgttttgagacggagtcttgttctgttgcccagactggagtacagtggcacgatcttggctcactgcaacctccgcctcctgggttcaagtgattctcctgtctcagcctcccgagtagctgggattacaggcacacgccaccacgcctggctaatttttgtatttttagtagagacgtggtttcgccatgttggccaagctggtctcaaattcctgacctcaggtgatccgcctgcctgggcctcccaaagtgctgggattacaggcacgagccaccacacctagccacttctcagctttttaagagatcaacagccaggcgcggtggctcacgcctataatcccagcactttgggaggccgaggtgggcggatcacgaggtcaggagatcgagactgtcctagctaacacagtgaaaccctgtctctactgaaaatacaaaaaattagccgggcgtggttgcaggcacctgtagtcccagctacttgggaggctgaggcaggagaatggcctgaacctgggaggcggagcttccagtgagccgagattgcgccactgcactccagcctgggcgacagatcaagactccgtctcaaaaaaaaaaaaaagaatccacaacataagtggatttattcaaatgtttttttaaaaatgtgttttataccttttggtaaagatgtaaaaataagtactagtactaataactagatactattttaaattacaatattccttagaataaattcaatttgctgaattctgaatatcatttaataaatgccaaaaataaggtcaggatcgagtaaggaaaacaaatcacaaaacaaatccttaatataaggaagagggtaaacaggtaactgcagcacacctaccacccgcggaactgaggaaattcggttatgagaacctgaagcttgaaggcggcaccaggggcagacggtacccaccctccgaggagaagatgctgggggctggggctgaggctgaggctgaggcatgaggagcttagcagaaggacctcggtgctgattctgttaagggggcctaaagatgtggacagggggaaaaaatctaaaaacgagaaggaactgccaattaatgactattgctgggcaatgcagacaggaacaggaagcaaacaagggccatgtcccccctcctgcctgccaggctccagctccctctaaagctccagggagcagctagcaaaggagacgtctcctcgaaaagcagagcacaaatggctgaactgcagctgagaaataacaacttaatcctggtgcattctgagcctcaatttcctcacctataaaatggacaaaacaccagagcccattcacagagttcaccacgtgtgttaaaataagtacagcatttataattgtgcatgtcacagaagacatgctaaatttatatatattattttcaaagtgttttagtttctacaatttcactgcttagaatttacctacaaattccatgttcttagtgaagagtaaggcaatgcaagcgcacacacagtactggcttggtacacaccctcaggaatcagatcctgaaaggcacacccagcacaaagtgaggaaccaggaaacctgcacctcccaagaggctctgcctccaaggagccttgacacacaggacaaaccaacacatgtcatctgccctgagtttcctccactaaataacagagcaagaataaaattatttctaagggttttgttcccaacatttaaaaatgttaattacaaaaactttttagtttttttaatgatctaatttgccacacttgcaaaaaagtagagaggataatttattgaactcctatgtatcactcactcagctgtagtaattattaatcttcgccaaaactgtttcattgcttcactttttttatttttggctggggtattttaaaggaagtgccactcacattgtagcacccagaggccatttcttaatggttcataggataatgctagatgatacataataacatgtaaatgaagacataatagcatacatgaataaaggtgtatgaattcttttccttaaggtacacatctagatcactttttattttccccccactgtgaatcaatttacatttttaatgtaaaaggatggtgaaaatgactccactgaaaaagccaccaagctccactcaggataatactattaatttctaattcataccacctgactcagtaaagccttacttctcttcttcctgtagtgcaagttaggtacctagttagaacctgttttactaagccaggccatctaggttataaaacacaaacccaagggccttcaatggtaggtactttttgcttccgcgcatgcattttcttccctagaaataatccattcaaaggttatttacattagccacaaactagaattagcatcttcattttcataaaatgaatttaccaaaaagtactcagaaatctctcagaatttatttaactttgtggaaggcagaaaacatattaatttaaaatgcatatgttttccccaaatcttcccctctattgttgaaataacccataacatcaataactctaagaaaacacaatgtaaactgtaacctaaaatactagccaaacatagctacatattacatgcaatttttcccctgcctctccctccattgtgtgtatttctctcccaactccaattattgggagaagataattttataatttgaaactacaatttctaaacatttccttgattttaattaaagcttatctcaggacagaagtttaggtaacaacaaataatatctagataaatacttacattatctatgcttatttttctctaaaaaggggcaatttaaaagttagaataaaattttagtacataaagaacatctttaacacaggggtattttcaaaggagcttacacagatgtatgtcactgtgcacggggctgcactacacacctgggtttaagggagcctcggagggcatggccatgtacacagcagccctcatcacacggatgctgaaatgcacagcaaaaccgggcaaatagccatgcatttcagaataaagtgtatctgtcatccgctcactgacctgaatgcacaccaacgcatgtgtgaatggacaattctcagggttagaaagtgtaagttcagcaaccactaggcatccttttggctgaagttgccaacaccagattccatcagtaccaaataggatagcaattcctgcacagcaagaatgcaaggaactaaggcacaaaacagaagctatgcttggctgtttccagactggaaaattattttaaaacatcacacagaaatattgtgtttcattataattttttaaattttttttggttgtgtgccaatttatccctaatactcaatactaccactgagaagctgaatctactgacataatgaaatagtaatgtaaataaatgttacttttttaaaaatagaattgacaacattcttttcttttgcacattaaattcactttttacatggggcagaaacactcagattatgactaatgggactggtggagatagtttgaggattctgtgtaacagagcggttttcagcttttgacataacatagcccttcagagcatcatgggaatctcagttttttaaaaaagtcatttttaattgaagctataatcactctacttgagaaacaaggaacaaaacgatgcatttcttgtacccaatgtgctgacaaagctaactcatctataattaataaaggaacagtttattatgaaacaatacagagtttcaaaaatgctaaaagaaatgtacaaataaagtacctcgggacatttatacagtgcaaatgtcaaacttttgtattgatcatgcctgattagggtccttttccccaaatttgatgaaagaacatgaattggctaaccaccactctgatggcctgatgggttaatcaatacaaagcaacctgggaggggaaaaacgggcaaatctattttctacggaggttagaaaaagcaagttagagctattagtagagccggatgttttattgcatagaataaagggggaagaagcaagaatgaacatgacctatttattcatctgcagcaaaaattgggcctggctatggtccatccatcatctggccttcatccagattcaatggtctataattaaagaatcacaaagatcagaattgttatcaaatgttgggcaaaacagctgtcaaaggagggaccgcccagacagtaaatgagataagaggctctgactttgagacaagcccttcagtgtggaaggtggggcattttatccaatcaatgttagataaaggttcccaatcatggagtagtgcagcagtccaagaaagaggcagatttctaccttgaaagccccactggaaagaaggtcctgcagccagatcctgcatgtaagcaccctggggagatggttaaattctgctcctttgacctgcaggcctaaccgtgaaggctactactgggcagggagctacttaagacaactgctcggctgacatctcggagtgcctaaaatgaacttctggccctttcatcagtattcctcattctcaaaatgttccctttccccaacatcacccatcatcagaaaaatgcaaatcaaaactacaatgagatatcatctcaccacagttaaaatggcttttacccaaaagacaggtaataacaaaggctggcaaggatgtggagaaaaagaaaacctcatacactgttggtaggaatgtaaattagtacaaccacaatagaaaaccatttggaggttccttaaaaactaaaaatagagctatcacatgatccagcaatcacactgctgggtatataacctaaagaaaggaaatcagtacatcaaagaggtatctgcactcctatgttcattgcagcactattcacaatagccaagatttggaagcaaactaagtttccatcaacagatgaatgaataaagaaaatctggtacatacacacaatggagtactattcagccataaaaaagaatgagatcagccaggtgcgatggctcgcacctgtaatcccagcactttgggaggcagaggtgagaggatcacttgaaccaggagtttgagaccagcctggccaacatggtgaaaccccatctctactaaaaatacaaaaattagcccagcgtggtattagatgcctgtaattccagctactcgggaggctggggcaagagaatcccttgaacctgggagaccaatgttgcagtgaggtgagatagtgccactgcactccagcctgggtgacagtgagaaactgtctcagaaaaaaaaaaaaaaagaatcaaactgaagatcatcatcttaagtgaaacaagccaggcacagaaagacaaacattgcatgttctcactcatttgtgggagctaaaaattaaaacaactgaaatcatggaaatagagagtagatgatggttaccagaggctgggaagggtgtggggctgggagcaggggagtggagttaatgagtacaaaaatacagttagaaagaatgaataagaactaatatttcctagcagagcagggtgactataggcaacaataatttcattgtacatttaaaataactaaaagaggccaggtgcagaggctcatgcctgtaatcctagcactttgggagggccagggcgggtagattgcctgagctcaggagttcaagaccagcccgggcaacatggcaaagccccatctctactaaaaatacaaaaaaaatagccaggcgtagtagtgcatgcctgtaatcttagctactcgggaggctgaggcaggagaattgcttgaactcgggaggcggagattgcagtgagaggagatcgcaccattgcactccagcctgggcaacagagctttgtaacacgaaggataaatgcttggggtagatatcccacttaatctcatgtggttattagtcatcacatgcctgtaccgaaatatttcttatgccccataaatatacacacctaatacgtatccacaaaaataaaaaatttttaaaaaaagttccttctctacttccaagcatctgattttagacgaagatggagctgacaggcccactgaacacagtggggtggcaccctgtttatgcttcagaggttccagaagtgtcaaacattttaaagaagctgtgtcattcttctattcatccacaaaacttttcatttccccctcagtttttgttattcccaaagaattctttaaaagaaaaaaaaaaacagaacatgtattccatgaccaatcactgaaattctgaagatgaggtgcagtagctggcccttgggtctgggtgctgtccttcacggagcccaggcctgaatctgtagtgtacaatgtttaggcgcctcattcaaccagccctggtgttgcttcgtcttttcgccttggcactccagttctgccttctcttggcttagcaggttggggcctcagggccgcagcagcacagggagtgtgtccagctgcgatgtttccctaaggatgacactcccttcctcatctcgcttctgccgccgagaccaaagagaccagaggtgggagttctttttaatatatttggttatgtcactgtctgaatcaatagcaaaggcaatcgaaaacctttttcttttttcttttgagacagagtctcgaactgttgcccaggctggagtgcagtagcgtgatctcggctcactgcaacctccacctcccaggttcaagcgattctcctgcctcagcctaccaagtagctgggattacaggtgtgcacccccaggcccggctcatttttgtatttttagtagaggtggggtttcaccatgttggtcaggctggtctcaaaatcctgaccttgtgatccgcccacctcagcctcccaaagtgctgggattataggcgtaagccactgcacctggccttttttgagaaggtgtctccctgtgttgcccgggctggagtgcggtggtatctcagctcacagcagcctctgcctcccgggttccagagattctcctgcctcagcctcctgggtagctgggattacaggcatgtgccaccacacccagctaatttttgtatttttagtagagacagggtttcaccatgttggccaggctggtctcgaactcctgaccttaggtaatctgcccactttggcctcccaaagtgctgagattacagacctgagccaccatgcctggcccagaaacctttttcttagtcaaattagcaattgctacagtctgtcacttcagacaaggctgtgaagaggtgtgtgccggacaggtcttagcatgtagaatgttgaatccccttctctgattcacttctcttctatgatggcttacagagaatttgtagacagtacagaactgcttcctggtgtgcatgtgtgtggtgtgtgtgaagagagagggagagacagagacagggagggaaagagagggggagagggagggggatcctactgaatagaggcaatataagtaaaaccacaattacaaagttttttttaaaataaaaaaaatctgcctaacttttcatgcctaatacaatcaaagttattaataattaagatttccagaacgtgtttattaaaatagtaattcaaataagctaggggataatcatactaaaaaagaaattctaaggctgggcgcacctcatgcctgtaatcccagcactttgggaggccgaggcaggtggatcacctgaggtcgggagttcgagaccagcctgaccaacatggagaagccctgtatctgctgaaaaaaacaaacaaaaaaaaatagccaggcgtggtggcacatgcctgtaatcccagctcctcaggaggctgaggtaggagaatcacttgaacctgggaggtagaggttgcagtgagctgagattgtgccgttgcactccagcctgggcaacaagagcaaaactacatcacaaaaaaattttaaaaatttttaaaaaaaagaaattctgggcctggcacggtgctcacacctgtaatcccaacactttgggatggcgaggcaggcggatcacgaggtcaggggttccagaccagcctggccaatatggtgaaaccccacctctactaaaaatacagaaattagcctggcatggtggcacgtgcctatagttccagctactcaggaggctgaagcagaagaatcacttgaacccaggaggcggaggttgcagtgagccaagacggcgccactgcactccagcctgggctttttgagacttcgtctcaattaaagaacagaacagaacagaacagaacagaacagaacagaacagaacagaacagaacagaacagaacaaaaagaaaagaaaagaaaagattagattctaggccaggcgttcacacctataattctagcaccacgggaggccaaggcaaggggcttacttgaagccaggagtttgagatcagcttgacaaccaagtgagaccctgactctaccaaaaaaaaaattaaattaaattagccaggcatggtggcatatgcctgtagtcccagctacttggaaggctgaaggctgatgcgggaggatggctgagcccaggaagctgcagtaagccaggattacaccagtgcactctagcctggatgacagagcaagatcttatcaaaaaaaaaaaagccaattctcaaagaaaaatccccatttaagtatagaaggtatattactgaactccggcatgtacatattcataccatgctgactaattacatggctgatcaagcagccagaaactgatcctgattccaattactattgagtttcttcatgatacagaataaaaatgtctgagaatctcaagttctccatgctccttgacaaagcttagaagttaattcagtattaccactagactctaggtggcactcgaggaattgctcaagaaaaccccgagcacattgccagatacttaggtccacccttactaacgtccaggagtccacaaaaggattcctcatgtgttgtacttctgcttctggactccttcgcctcaccctcagccctccaggcaggaagagagggacagggcaggcacacctaacatgggattgacagttccaaaacctgaagccttcagttttcaatctgaccttgtttggaggacctaatttggaaaccagaccttgatttgcatacagaaccttccacctcacctacccctccccctaaaaaaaaaaaaaaaaaaaatatatatatatatatatatacacacacacacacacacacaaacatacatttcagaccttttagaatatttcagatatattctaaacttggctgggcacagtgagtcatgccttgtaatcccagcactttgggagaccagggcgggtggatcacctgaggccagaagtttggtatcagcctggccaacgtggtgaaaccctgtctctactagaaatacaaaaattagccgacgtggtggcgcatgcctataatcccagctactcagtaggctgagacaggagaatcgcttgaacacgggaggcggaggttgcagtgagctgagatgacaccactgcactccagcctggccaacatagaacaggtagtgtataacaagattattgatacataagttgagaaataggttagaaaatccaagaacaaaatccaaacattaaaatgaacaaatcatctgcagcaaatctagatagctagtaggagtgatctttctgctaaagaaatgccaataggtcaaaaataaaagtttcatttctaaagaaagaacagaccaaaccccaagtgtcattccacaaggtttcacaaagcacatctgtcaatgtctaaagcatcccagaggcagtggtggggagatcaatggtgcctttctctgcagtggcatttaccacggtgttactgatagtgcaggaatttaaggctacaaaattgtcacctattcatcactgaaccataaaaacacaatggggaaaaaagatatttgatagcctttggcactgaaaaatgcctaatgatttaagatgattttgtttctagccatattggaaaagtatttgctagatgattctaagcattaaggcattcacataggggtgatatcggacaaactcatctttctagtccaggccagtaagaccagccccaaaattgacagccagcttgaataggcatggcaaattaagcagaatataaatatcagccactgaggctaatgtttatttttaaattccacaagaaacaaataatattgtgatgacattattaaggataacacatcatgctaagctccattctcctccgtgcagcctgaaggagaaaccatctgctgctttaatgttccaaagttacataaaggggaatgagaagaagggatgttcttaaactaggggaagaggaggtgcagtacactaatggtgcatgtctcctgctcagcctttaacttcctgcatggagtgaggatggatacggattgtcctcaagcggcctgaaatggtcaaggtggaaaaataagcaagacagtaactaccacgggttcgtaaatgcaagaaaaaaacagctaagcaacaaataattcctcatctgcaacaactacaaatgaaaaccatcaagactccaggactatgtgccgagacaagcctcttttctggcaaatgtcttgaccttatcaaaaaagctcagtaaatttcttggccttatcaaaaaagttctgtggttactagcataaaaataccttcctctggagaacccttctcttttcattatagtattgtctatcatgagattttgtgggtgctctctacctgatataacctgctcagtgcaactgaatcatagtcactgcatcatatcaaagttttgaactaggagtcagtcatctatcacagttcacatccatgtgagtagcttcaagagagttcaaaatccaggaagagcagagagaggaagatgaaaaacagacgtctctcctcctccaaacctggctctatagcattattctgactcccacaatatatatattcaaacacaggaagaagaaaacactccaaagccttttatcttcaaagatatatcttatggtacatatttaattttcattgataagcaaaagaagaaaaacttggccaggcacagtggctcatgcctataatcacagtacttttggatgctgcagtgggaagatcgcttgagcccaggagttcaagaccaggctgggcaacatagcaaaaccccgtctctactaaaaatttttaaaagtttgatttttttttttaagagaaacttatttgcataataggaccttctcaaagcaaagatagattgggtattaattcatttccattccattcattcattcattcaacaaatgtttactgaatgcttatgagcattgttctaggacatggggatacagcagtgaacagaacagattaaaacaggtgggaatgtaaattagtacaaactctatgaaaaacagcatggagatttcccaaagaactaaaattacaactaccatttgatccagcaatcccactactaggtatctacccaaaggaaaagaagtcattatatcaaaaagatacctgcactcatatatgtatctcagcactagtcacaatagcaaagatagggaatcaacctaagtgtccaacaacagatgactagataaaagaaaatgtggtatacagacacaatagaatactattcagccataaaaaagaatgaaatcatgtcttgcagcaatattgatggaactggaggccattatccaaagtgaaacaactcagaaagtcaaataccacacgttctcacttataaatgggagctaaataatgtatacacacggacacagagtgtggaatgatagacggtggagactcaggaggatgggagggggtgaaggatgggaaagtacttaatgggtacagcaacatattgaatgatggttaaaagccaagaattcaccaccacacaatatatccatgtaacgaaactgcacttgtattccttacgtttacacaattttaaaaacattaaaaaaaaacagaaaaaattaccttacctactaacaaaattatgcaccgtaagagagaagcaggtgataatttgcttgcaacaaatgaaaaggaactggacccttctcacaaaatactgattttcacataatttaatgacttgatgttctgagtatctgcattaaaatgtgatttaaaaaaaaatttaaggtatctgacacctcacatggtcctctaacataggtacaaaaacatattccaaaaggatgtatttaaaatttggctttcaatcctatgataaaagtaaaattctactaggaagaataaaaatatagtactctttgacaaagctacacctatgtgtctaaaagatttatagtgaaaaggtcattcaaagttagataaccagaaaatggctaacacgaacaaagtcacaggttatgttagcagggctgagagattctttattagtaaccaggttaaagacttgtatattgactttttaattttgaccccaaagcaggtggcttatccgtgctcttatcacgtataaagaccatctctctggcctgggaatctgagcagcatttggcggctagcctcccaactccatgcacacgcacctctgtgcagctgcaggtgcttcctcagaacttgagaagcctcaaaacacaagggacgccttcacgaaagctgacaccaataccagccagcgcgtgcacaccggctcgccaggccgccgctggctctcaggcaggtgatctgcaccactatgcttctgatttcttactggggtgagcacagggcatatgctcaaatgccactggcttctttctcaaatctgtcactaaacagttctattatcttcatatcgcctggtgctctagacttcagtttcttcacctggcaatgtttaggctggattcactttgggacctttgcgggaggaagtgagggtacctgactagccccaaccccatcccactaccactggagattctgattcagcgagtcctgagtggtttctgggcatctatggggtgggatgtatgagtgtgtgcatgttttagagtatctataagcacctagtgaaaccatggttaagaaatcctacactaaatgacaaagtcaaatcaagctgtaagaattcagggtccaatccaattccatccgtgaacagttgcaatcccttcccttgatcaaagaactttgttgttggttttgtttatgctttcaatcttgtttttaagacacaaacagggaaggaacttggatcatcatcaacctgaagttgtgtgtacctgaacctcccagaaaagacaagaatacatttctacctcctcattttacaactgattacttcagcaacacatcggcggccatcaagttttactaaattgagaccagaccaactccagagtcatcggacagaggcagatgaggtagcatctggctagagagatggcgggcacctgtcaatggctgctcttgcaaaagttactgagactcgcagtaagaattacagccttcaaatcaaaagaaataagcgtttaggctgcaacacacagcataagacagttgctgtgggactttgcctgtgaatataatttctgttgcaatgtcatggttccaatggaagtggagaagcattataaagaaatagttaactgctttctgcttttaagaaacaggtttgagtcaggtaacccaaatatatcgatagatattctaacgatataaaatgttgattttggtagggaaaaataaagtgatgcacgcaagtcaaactttcccattaaataggatgcatttaaaacctccttcctcaagtaacacattcatctaggccacaacgttgaaatcttaattttaaaaaaactttaaaattctttggcatttcatattaaaacatagtggtaaaaaaactaagaaatcttatatgcatcacagcaatgaatacaatctttcaaactgcagaagaaaattaaaatcaagaaaaataccaaggagttgctatcaccatacaaggctacaagataaatttaaacatcaagaaaagcagaaactgaaaggggtaaaatgcttgccaaaataagattatatgtatttccacatcagggagaattcttttcacagttaatgtaagttgttctatctatcgcaaagatcagcattaactgtacaatctgtacttctgcaagaattcagaagtagcactcctaaggtaaaaaagaagtaggtcatgaattacaaaaacatgctttacagttttaaagatataactctagatttacatatcacaaaaaactgggtttagttacatatgatttttattcaaaaggataaccttggaggccaaggtgtgaggattgctggaggacaggcattcaagatcagcctgggcaacatagggagaccccatctgtacaaaaagtgaaaaattagccaggtatgatggtgcatgcctgtcagctactgggagactgaggcagaaggatcacccgagcccaggagttcgaggctgcagtgagccatgatgacgctactacactccagcctgggtgacagaggaggattctgttttttcaaaaaagaataacctctctccctttcacgactgccattagtatttatgcataattttcatctttctcacccacaattaagatcgagtacaaccctgaaaacttttaaagcacaaattaacataaattacagtgcagctggttcacaacccaaaaaggtaaacaaaaaatttaccaccagctgagcacccactcattctaaccaagcagctacaggttcccaggcagcatgctccattcattctgatcttacagaaacagctcctcgctgtgatcatgtaatcatgtaactaacagttctcaatatgtaccgtgtttcctaactttaactgcattatatccactttgtattaataaacacatgaacggcccagtgcattggctcatgcctgtaatcccagcactttgagaggccaaggcaggaggactgctcgaggtcaggagttcgaggttccagtgagctatgatcacactactgagctctggcctgggcaacagagcgaggccctatttctaaaaacacataaccagtatgctccttgtagaagaactgttgcctttcaggaaatatgtattaatcctctaactatatgatctacatttttttcttcaaaataagcaatggttccatgttgatcctcctgtactttgacatctgttgcctgctttacttagtagtatgaagtggcaaaaattctatctggagtaagggatgtggaatacgggtaaaacttaaagaccttgtcttgcttgattctttcttgattgaactgtattcagcagtcttttttgttgttaatacctctaggatgataaattccatcctctctctgacctatatgtacttcatttctcttgaacatctagggcttcagtgatctaaacgattctattcttaaatccaaccttatctcagcatagtttaaacttggcttccatttctggaaaaaaaaaatcttcatggagatccgggaagcaccggaagaattaatgctcaacacactgcatgatatttccttaaaaataactaaggagaacctgcttcaatccaaatcaggaatctctctatctagggagagcatgattttgggagaaagcttatttgccacagattaaactaaagatagcaaaaacttaaggtgttttttgtttttcattttaaactaatatcttgagtactgtgatatgcacatttttacctagttacataaagctaaacttaattatttcaaaaattataagctatcctcgaaaatatgaattgtatttaagttttggaacctctcattacttgtggttggtaaaggaagccagaacacacaatttgcacaacacaagagtaacaagaaatcaagttccagaatattttcatatttacacaggaaagcaatgtcacaaacttatcaagaacacattactcctttagggctggggtgacattagtagccaacaccaccttttctgctacgattaggaaactagtaatgaagacaatcaacacaatacaagtatccacacatatatattctgttttctatttaggaatcaaagttattctctctactacaaacaagagacagagaagaaaagatatcgagacagacagacagacaggaaattgagaccagtctgggcaacatggtgaaaccccatctctactaaaaatacaaaaattagccaggcatagtgaagcatgcctgtgatcccagctatgtgggaggctgaagactcacttgaacccgggagggagaggctgcagtgagccaagatcgtgccactgcactccagcatggaagacagagcgagagtctgcatcaaaaaaaaaaaaacaaacaaacaggaggagagttctaattcccaacttgttacatattcttagcaagtagttttctaacacagcacttagccagaacataggtatgttttaatattttttgatgaacagttctgtactcaaaattatcctggttatatctgtatttcttcgttaacaagaagtagcactgtctattgtacaaagaacgactgtataaaaagcacctctccacaagacatccccaccagctcgacagtttaacactgccacagcaacacctgaaagttaccacctttttctagaaagatcagaataacctgccccttaatttgcattaattaaaagtgggtataaacatgactgtagaactgcccctgagctgccaccctgcgctcactgcctagcgggtagccctgctctgcgggagcagccacagagctgtaacactacagcctcaatacagctgttttcttctaccacctgcacgctcttgattttttttttttttttttttttttttgaggcaaagtttctctctgttgcccaggctggagtgcagtggcacaatctcggctcactgcaacctccgtctcccgggttcaagcgattctcctgcctcaggctcccaagtagctgggattacagacgcctgccaccatgcccagctaattttcgtatttttagtagagacagggtttcaccacgttggccaggctggtctcgaactcctgacctaaggtgatccacctgtctcggcctcccaaagtgctgggattacaggcgtgagccaccgtgcccagccctcactcttgaattctttcctgagcaaagccaagaaccttcccggtctaagcccaattttggggcttacctgccctgcatcaatttaactataattctactgcaagccaatttaagtaggacacagaaaactataaaacaacacaccttactatgttgtcttcacacatgtatatgcacgtaatagatattataaatctctagattgcttaaatataaaatccacccaatttgctttgcttcttaccttttctatcaaggggattcacaattacctcaaggccttacaagatcaaggcagtattattttgagttgtgtcttctattaatacttccttgaaaaggaagtcttttttaacaggtaacctataatttatatctctaatttacagcttttaaagcttttttgttgaattttgtaaaatcatctaactttctgagttagcatcattgtttttctgctgttaagcaactttgtcagattgtatcattctgatggacttctacatcttggttgttattttctccataatcaaaacctagaagtcagtatacagattcagatatatagataataataacctaggtgtcaaagaagatgattgaagtccatgaacccagtcatacagacatctggatgcatgaatttcaaccatttacttcaaaaaccatgttctgcttttgctgaggcagaaatttcaatcatctatgctataaactgaacctctcacccagtgagctcagaaaactccccaatatgatatttcagcttctcttttttattccatttaatacaataccccaactttttttttttttttgaggaatgtgaaccaaagttttattagttcatttcttgcatttaaagtgctcttcaatgacatccttggcctgagattccttataacttccatagtccttaactattacacaacttcaaccaacctttctacagggtcttccctctgtcagtattacagaggcccacccattccctagtttcttgttttcatcaaccttaattaggctaatctggtgttcagcacatgggcctccaccaacttcacacacacacacacgcgctcatcacagttggatacaggcacacaaagatgggcttggtacttgtctaaggctctggcggctccgcgaatctcatgtgctgggccatcatggacgagagtggtcttcagcaccgcttgtaaagcagtgttaacaaccatcacaccgccagcagcaatgccctcctcagccaccaaggcaggccacaggtaacgagtgatgccccatcttgaacgcacccaagcctccgcctccataactcaacagcagcagggaaaaagcatggtctcaattctcttgacaaatctcagaggtattatactcttattccaactacatctccctccccaaagaagcgcacacaaaacaattttaaaacttatgttttctacggaaaccttacctcaaagtgatgcacaaaactgaaatttatatggctgcttaaatgtcacatcctggctcctagcagggaaacaaaacgctctgaagagaggatggttcctgcttgagggggaaaaagtctgtctttcttagcagtgctccttcccacaataaacaaatgatccaggaattttgtacaagaagtctacctgattcttcgtctacccgcaatgtccccatccacacacatcccccaaaaggccacatctcatctttaagatgaaaagtaattccattttacctgccagcttagaacttaataatttaaaggcatgtttacaagggcagaacatcatcattatcatcactaccactggaacgacacgcaattagaagtcgtttagggaaggaagttagaaatgctcggcggaatttaattagacaaattaggttttggcagagatctctaggtcaacaccctacttctataaacaatattatggaattcttaatgacaatacaaggcactcattcttaaattctcaactggcaaataccaacacttaggccaccaccctcaggttcaagcagttttaaactatgatttttcgaaagggaagagaaaagattctgccaacagaatcagcaacaatacttttaggcagtctctgaatttcctcattcatttctggtattactttctgcatagtctacacagaaagtttaatgtcttaaaaacaggttttattctgtgtctttactcaaattacattaatttgaagaaaatatcacatcgaagaaaatcaggtttgctgaaaattctttaccaacaaacatccaatatggtggcagtttctgcggaaggaagtatgttacatataaaatagagatttggaatgtcttggacttgatttattttcagtatttcagtgttgtccaataaggaaaatataagaaagatgattaaactggccaggcacagtgactcacacctataatcccagaactttgggaggctgaggcaggaggactgcttgaggccatgagtttgcaaccagcctgggcaacatagtgagacccccacatctacaaaaaaataaaattaacagggtgtagtagcacatgcctgtggtctcagctacttgagaggctgaggtgggaggactgcttcagcccaggagattgagactaccaagagctgtgatcatgccactgcactccagcctgggcaacagatctagactctgtctcaaaaaaaaaaaaaagaaaagaaactaaaactgcaagatttagcagacatatgaggaccaaaataagtgtagaattgatgacatattaagtgtccattctataaaccattaagagatattcccaaaacacacatcattcataaactggccagaatcagtatcacacatttgagctgaatttgtatgaagagggaaacagttctgaagcacctatctgtaatgctgcaaggcaccactcttctccgggcagggggacacagataccatgactaactctcaatggtttcacagctcgaaaatcaccgttctaatgaaagaccaccggagggcacacataacccatggcactcatccaaaagtaaaaataaaaaaagcacattttatgtgcagggtaatctttactttttatctgttattgctgtttggtaattacaaactagctccaaaaatatcaacattaagaaaaggaatctttataacactgttaaaagatccactatatattgattgtatagcctaaacttacagtcatatatccagtagcttcaaagaattctttttaaaaaatgtttttttaatttatttatttatttatttaatttatttatttattgagacagggtctcactcagtcaccaaggctggaatgcagtggtgcaatctcggctcactgcagcctcaacctccccaggctcaggtgattctcccacctcggcctccagagtggctgggcctataggtgtgcaccaccatgcctggctatttttgtattttttgtagagacggggtttcaccatgttgcccaggctggtctcaaacttctaggttcaagtgatccacctcctttggccattcaaagtgctgggattacaagcatataccactgtgcctggcccaaagtatttttcagaaaaaaatatttttaattctgaacaatgtacagaactgtgaaattggagaaacactaatttgcttttattccattattttgttatacataaaaatcaactaatcctttttagtgagatgtttgggtaacatcagggtctccattaaaaacatgttttagtaagagattccatacgagtaataaggatctgctaatatcacaacttgttagtattgcagcatacagtaatttaaacccttgcaataagtgaataaacataaacactaataaataataagcattcacaaatgaattgatagcacagaaaatatcagtatgattttgaaaacaaaaatgttcaaaaattaatcaggaaactttttcaaaataatattaaggagtaaacacaaagagtaagcatgactttcaattccccccgcccaccaagaaaataaaaattaaaggggtgttttaaggaagtttctgtaccaacctgccttttgctgacttctgaagtggctctcttgaggttcaatgaccttgaaaaccttaacgccttcaccgaatccttccgagaggtcccagaaaaagagtaatacctctttgcaggtttccccttcgctctgtctgccatctcaacccattaggaagacaaaatcctcaacagcacagacttcaagactaacaacagaataaaatgatccccaaataaacagtccacccaaaatgtaaataaacaacctgttttgctcagtcctcaaggaaagggcaaaacctcaagtaaagggtaaaaaatggaaagcaggtggaaaataggggaacacattccaccacctaagtaacccctcaatggacggcacagacggcatccggcagtgtggactccaggttcaccagggaaaccagctacgcctcaactgcaccaaattaaaactgcaccagtcaaacaggccggaggtagtttgtcaagagtaaaacagggtgtagcaaaacaccctggagtcagcagggtgtgagagcacacatcaggttcaaagaagtctctcaacgcattccttgccaaaatagacagagggctataggataggatcaaatcaccactcctacttcaaaccaggagccctcggagtgtgactattttgttaagctctttgaaaactctcttcttccagtgaatgagaaatggagtgatcggatgctcaaatacacatattttactcagagaaacacaaaacaaaatagtcacaagcattacgaattaggagtctggaacgccacctcccatgtcacagaaagaggagggagggtgtttttataccctttcaaaaggcaacaggaacatctttccttcattttatctcaggtctcactgaactgaagttgagctcgagaacaggtcacgaaaataagacaagtcgtctgtgcaggaacagggatggaactggaggccattatcctatgtgaaatcaccaaatcagacaccgcatgtttcacttacaagtggaagccaaacagtgggtacatacagacacacagagcagaataacagacactggagactccaagaggtgggagggtgcaaggtgtgaggacagaaaattaccttctgtgtacaatgttcactatttaggtgatggatgcactaaaagcccagactccaccactacccaatatgagcatgtaagaacctgcacttgtactatctaaatatataaaaataaaaataaaaattttaaagaaaataaaacatgagaaaatggagaaataggtctctagagaaagtactgaatactatgaatacctgcaatacaattatacttataatactattaacactagagccccacaaaacccaatgctttaggacacctacaagcctaacccaaggattgaaagatacagtacattcaggccagtgtggcagctcatgcctgtaatcccagcactttgggaggccgaggcgggctgatcacttgaggtcaggagttcgagaccagcctggaacacatggtgaaaccccatctctactaaaaaataaaaaaattagccaggtatggtggtgggagcctgtaatcctagctactctggaggatgaggcaggagatcacttgaacccaggaggtggaggttgcagtgaaccaatatcacaccactgcactgcagcctgagtgatggagtaagactccgtctaaaaaaaaaaaaatgaggggaggggaaggggaatgagaagcgggagggggaaagataaagaaagaaaacgttcaaggtaacaagaggcatggaattattttttaaaacacataccaatcattaaagaagctacataaccaattggaaatcatcattctcagtaaactatcgcaagagcaaaaaaccaaacaccacatattctcactcataggtgggaattgaacaatgagatcacatggacacaggaaggggaatatcacactctggggactgtggtggggtggggggaggggggagggatagcattgggagatatacctaatgctagatcacgagttagtgggtgcagcacaccagcatggcacatgtatacatatgtaactaacctgcacaatgtgcacatgtaccctaaaacttaaagtataataaaaaaaaaaaaagaagctacataaccaaacagcctacaccagaaatatacagctggtgaataatataaacacagaaaatttaaggacagctgtatttaacagtgttatacgatgcaatattactcaaagtgtggtcccagtctccatgaagtacagaaatagagtaagcttttgagaacacagcaacttgactgagtaattttatatctgttaactctaataatagctaaaataaaggcccataaaacacaagccactttatcccagtaatttatttgcattgtattttaaaagtattgttctgccacaggttggagggaaaaaaaaagcaaatctagtccttcacagcgacagtttgagaagtaattagttgtgttaactaaaggtagaaagaatattcaagactgcctctttggggagggagagaaagttagaactagcccatctggaggctgacctgaacacacctcctaatttatccagcctgaatattcccacctacatatgggacttttcttgctttaaaagtatgtggaatgcagctacactaagaaaaaaaggatacaaaactttacataccttatagaacatggaacaccactgttgtagctgcaaacattttgctagcattttcctttattatatataatatatatcaaatatatagtattatacatgttatatataatatacatgtatataattagatttttatattttatatatgtattttacgtatgtattttatatatatatatatatatatatatatatatatatatattttttttttttttttttttttttttttttttaagtaagacaaggtctcactatgttgcccaggctgccctcaaactcctgggctcaagcagacctcccactttggcctcccaaagtgctgagattataggcatgagctaccagcaccccgccaacattttcatctccccattttacaacagatccctaaggacaagtgttctctatttacttcaatctctcaagtcctgcctagaatggaacagatgctcaataaatatgtgagggctagatgaaagaaaaggatgctgttacagaaatgcaactgcagtgtcatctcaacctcaagttcccagcagccaagagatccctgttgacactacccacaagtgctgataacaaaatgcctgatagtggacggtcatcattcgactgtgcccttgaaaagaagtatctcttgacaatcttttgtaagaaattaagtcaagcagtatagcacacattcagacgcaaggaacttcagaattcttgcgtggtagtgcacgcctgtaatcccagctactcaggaggctggggcagaagaactgcttgaacccgggaggtggaggttgccttaataatgtattgagaatcctcaaattctaacacacagaaaataaacaatgtatttcttacaactatctctgggtgccaagtatataccatgctctctataaattcatagaaataaaaaaataagtgaaactgattacctacagaaactcatttcataacacaaatatctaggatagcctggtttgtttgctcgcttgtttttaaatcctcaggccaggtgcagtgactcacacctgtaatctaagcacttttgggaggctgaggcaggaggctcatttgagcccgggtgttggaggctgcactgagctaggatcacgtcactgcactccagcctgggtgacagaccaagacccatcttaaataagcaaacaaacaaaaagccaggcatggtgatgcacatctgcagtccaagctactcaggcggctgaggtgggagcccaggagacagaggttgcagagattgcatcactgcactccagcctcggtgacagagcaagggcctgtctcgaagaaaaacaaaacaaaacaaaataaaacctcagaagcagttattaaaagaatgaagagcctaatttgacaatggtggtggtggtggtgatggtggccgacaacggcaaccacaattaacatttcctgggaccttattcttgccgagcacaaaaccttaatgtgaattctaaggcttaatcttaaacttaacctcataatgaaatcatgtcctttgcagccacatagatggaactggaagccaacaccctaagtgaaataactgacacagaaaggtgaacaccacgtattctcattcataagtggaagctaaacaatgggcacacatggtcataaagatggaaacgatggacactggcgactccaaaagtgggaggcggggagagaagcaaggcttgcaaaactatttaccgggtactacactcacagtttaggtgatgagttcaccgaggctcaaatcccatcatcacccaatatacctatgtaatataactacacatgtatctcctgaatctgaaatttaaaacaaacaaacaaaaaactcgtaagatagttactatgattataccccatttacagatgggaaaaatgaggtaagagaagtcaagtaaagacagcgtgaagccgggattcaaatgcaggcagtgtggctccacagcccaccatacgagatgccaggcacttccaaagcaacagaaaagcacagcgcggcacaccaagttattaagccccagcctgggattggtgtaacagaaagagtgagaacctctgtcccctgactcactgggtggccccagataagcaaagtcttgagggctttcgctagaaggactgaggcccagcccatcctgtgcaggctgaccccaaagctcctactgctcgtgaggaccctcacttttcatgcaggaggcctggccccctccgaactccctttcactaacacctcactgctctacctgtaccatatctgggccctgtgctcccacaaattgatgaactgtggccaaaccagtacccacaaaacacttaaatgttgggaagtcatctttctgaattaattagccatttgctgctctgcttggcagcaaatttaaatatttgcttctttacactctaaaataagctcacttaggaggaaatgaataaagtcatctagttaatgaagtcaatttatacaagttatttcatttccaggttatcaaaatctttaaatcattcagttcctatgccaattcatactaaagtccaaaaaaagatgtttctattctaagctatatttataactaaacctaatgcttctttcctactggaattaagcagaagtagaatatggagtggacagtgaaaacgaaaacaaaacagtgaaccacacacactgtcctcagagatgaccagtactgacactttttggtctacccctcaaactttttctaatgtatataattattgcactaaagttagattatatttggtacattgttttaaactgacttttcacagatttatattggattcacagatttatctacggttagtcccaaatatccagctgccgaactaacagctccaagacactcaaactcacagaagacaacactgaatgtaatctcccatccctagtctggcaacctcgcagcagtccctaccttggtgaatgccccaccatctccacccagcccaatcgccatcaatttcaacctccttccacaaaactggcaggagccacacactgcctgcattcgaatcctggttccagaaaacctgctgactggcctctgccttccatgctgcctcctcattcattcttcacacagccaccagggggatatttctcaaatgtaaacctgatcacttaacacctgctggtctttcagttacatgtctataagactttggcttgatgatacatacacacacacacacacacacacacacacacacacacacacacacacacacacatatatacacacacacatatatatacatgtatatatatacacacacatacacacacacacacacacacacacacacacacagagtatagtagcactaagcccaatgcctggtacaaactaggtgcttagtaaactgaattacctaaaaatattagtctgattttcttgcaaaggaaattattccatatgctatcttttaaattattcacgcactctggtttgaaaaacttattaacctttgagagggagagggaggccacttagctttgattcaatattgaaactaggttttaatttattccatttaatcttaatctcaagtattcatcagaagacagtagggtatgtatttatgaataactaaattattccttttgattaagacaacagaaaacacatttcataagtttttcattatactgttttctgtaagtaggatttatgataaggtatgccttcagaaaacactgcttctttaaaatgtatatttccccaagatggaaagattaagatgcctgcattaaaagcatgttctcctgggctacatccacttcacctgaaggaaggcaaggaattcaacaactcacctacctgatcagcaaaaaacagtacgctggtcaccatgtaacaccctaggcagatatcataattcatgtttacttacggaaattaagccacatgtgcacaaaggaaaaaactcagagtaaaccggtggcttaaacattctaagggagttaacaacttaatgcacgtgattcccgcaatcttttttttttttttggagacggagtctcactttgtcgcccaggctggagtgcagtggggcaatctcggctcactacaacctccgcctcctggccctacacgattctcatgcctcagcctctcaagtaactgggacgacaggcgcgcatgaccaaacctggctaatttttgtatttttagtagaagcagggtttcaccatgttggccaggctggtcttgacctcctgacctcaaatgatccacctgcctcagcctcccaaactgctgggattacagaggtgagccaccatgcccggcctttctgcaatcattttaaaattcgaggtagtaatcatatgatgccacatcctaatggaaattaaacacatttctgggatccccaccctgcaactcatcccatttttgcatgtaaaacactgaactcaaattaatttcacatgtttagtaataactaaaatactacttacttgaaataagaacaccttagttatttcaggtatcactgcttttcactaacacataatttacttgaattccttaagtgtgaactacaattgttacaaatgtagtatgtgaagccctccctcatttaatatgtcttatttttacagcttgtagctctgtgaaatgttaacaaattagaatctggataataacttacaacctcggtccttgtgcgataattttcctatggctcttttctgtcttttcactacatactcaagttgcttttaatattttgtatattttaatgttaaaggaaactggccatagttgaaaattctatccaccaaaggcacttccttaggaaacttcagtatgtattaataagaactcccttaaaaaaaaaaaaaatagggccaggcgcagtagctcacgcctataatcccagcactttgggaggccgaggcgggtggatgaactgagatcaggagttcgagatcagcctggtcaacatggtaaaaccccatctctactaaaaatacaaaaaaaaaattagccaggcatggtggtgggcacctgtaatttcagctactcaggaggctgaggcaggagaattatctgaacctgggggaaggaggttgcagtgaactgtgatcgtaccattgcactccagcctgggaaacaagagcaaaactccatctcaaaaagaaaagaaaaaaaaaagccaggccggacatggtggctcacacctgtaatcctagcactttgggaggctgaggagggtggatcagttgaggtcaagagttcgagaccagcttggccaacatggtgaaaccctgtctctactaaaaatacaaaaattagctgggagtggtggtgagcgcctgtaatcccagctactcgggaggctgaggcagaagaatcgcttgaacccaagaggcagaggtttcagtgagccgagacagcgccactgcactccagtccgggcgacagagcaagactctgtctcaaaaaaaataaacaaataaaataataaattagaaaaataaaaaattatgaactttttacattaaagcatgttcctaacctgaaaattctgccatacttgtatttcaaaagcaaaaattattatagcacatttcaaaaatatcaatataaaatgcctaatggggcagtaattttattaccataagaggcaccaaaacaacatcagtatgtaagttagagactatacccagggcaagggggctggggaaggatggaaatgtgcccctgttagcttttcctcagcacgtggagttgttgcctgcctgtgatccccaataagttttttaaagtttctttttcttcccaacatttttctaacggaactggccaaatcaccccctagaaaatcccaaattctctgataaacatcaacaggcttagcagccagcaatctccaccacaatccttccccatgcctggcttcagcataaacgtgcaaactcttcaaactgagtttacacagccattccatccaagacttcctccacaaagggcaagaaacagatagtgcaaggcatctcacagggtcaccaccaaaacagaacatacatgacatcattcctgctcaaagcaaaattacatccaagaacgacaaaggaagtgcttgatattacatctctgaatcaccttcagcaccaaagatagtaaaagatgacaacatggggaagaggaagactttctccctgttgatcatccacacaaaagtgtacttccccgccacctactgactccacatgcccggtcagttacacctgaaatcttttttttttttttttttttttttttgagacagggtctcactctgttgcccaagcttgagtagagcagcgtgatcatggctcactgcagcctcaacctcacaggctcaatgcgatcctcccacctcagcctttgagtagctcagactacaggccagcaccaccacactcagctaattgtagtattttttgtagaaacagtctcgttaggttgcccaggctgctctcaaacttctgggctcaagtgatccacccgctttggcctcccaaagtgctgggattacaggcctgagccatggcgcctggctctgaaatctttgtttacgccccttacaatcagtctcaggtgactggcctgcgcaggaactgaatcccaagtatttttattctgtgataaatttggaaaaattatccacatttctaaatttgctgtactacccacagggaataaacaggagtggcctaggcccactgttgagaacgaagggaaggtcctcaaataataaatgacaaagaccaaaccagacagagattcacacaaaatacagcttgtccatcaggaaagttcacgtacacaaacgcatgacagctgctctaaatggtggtgaagataacattaaactgtttcagtttttcctaatttggcaaaatgtcaattgagaaaactgagactgagatgctaagagtaaacacgacatcactgttccagaaacacagagaaaggacaaacaaaacaaagtacctttttacactcaaagagatctagagtattctacaccttagaaaatcaaacctactccaaggggccagggtaatataatagtaccatttgaacaaatttgggtaaatcctggaagtgagaactgtataggcactaacagaaaacttcctcagtgctgtgccctgaacgttaataattaaaggataatgaggaaaattaggggtaatttagtacttgactttaattttcttttgctatcatttaaaatactgcctcttcccctccataaaaaataagtttttaataatgttacaaattcacaacgaccaagtataaaatttgcatcttcaagagcatcttccctgctacagaggcagagccattaaagctgtggttttgtaacttagtgagcctaaatagcagcaggagggggactgtaaaatgcagatgcccaggacccttcacagagatcctatttcccaggccaggtatctacgttttcaacatgcatccaggggatattcacaaaacaggacattattttagatacatgttattatttaagagaggtataatgcttgttcttttttccttaaaccaaaaagcaaaacaagtgtcaaaatccttacttggagcagctgccaaaaatagttgaaaacactccagaatgattaaatcaggatcgaatgtcagagccacggaaaagagccgtgcgaccgactgcatcacacgatccctcagtctgaataatgcgtccagccatgactgtgaatctgtgtgaattatgaaaaactaggtgttgtgagtctaagctactaatcatatttcttacagtttcaacttataatgggcactttaatctaggaatgtcactcaacaatatttaaatcaattatgcatatattttaaagtatttctgaacaaataaaaaacggctttaaaagctacttcagtctatggtataaggtgctctagcatttttctatttggaaactgatttcaatcaacatgatataaaattgtctaaagtgttatttcacctattaatgtttaaaatatttttctcaggttaaaggacattttaatttgtataggaaatatgataaaagattctagaaaatatattttttattatcaaattcgcagaaggatacaaaatctaaaacgtcgtttactaagaattgtataattttaatatgccactatttaaaaagatcaagcatagtttgccttttgcttggttttgtgtataatctaacagttaattgtgtcaaaacaagagtgcatgactttcagttgctgaataacacattattcagtaaagatccaaaacaacatcatccaccttaccctcactgatttttacatgttatttatttatttatttatttatttatgagacagagtcttgctatgtcgcccaggctggagtacagtgggcgatctcagctcactgcaacctccgtcccctgggttcaagcagttctcctgcctcagcctcccaagtagctgggattacaggcacatgccaccacacccagctaatttttgtatttttagtagagatgggatttcgccatgctggccaggctcatcctgatttcctgacctcaagtgatctgcccacctcagcctcccaaagggctgagattacaggtacgagccagcatgcccggatggcctcactgatttttataatagcccaatgactgcagaatacattattttcaagtacccataaaatgtccaccaaaaaggccatatgctagaccaaaaaatatgtctccatacatttcaaaagactgcaaaaatcattgtgctgaacatctacatcatgatgttctactggctccaaacataaactctgagggcatctaatgtcagctggagtgcaaggggacaaatggaaacagtaattggtactgcataacccttcaggccttactacattatgctgagcataaatgagtccattgagttcagcattctcagaagcattgagatcgtacagccccataaatcctacttgtgcaacaaccaaacttccacaacaggttattccaagccatgcaccagggccaggcatatcccagaaaacatgttataagccacgcctcgctagctctatggaaaggcacaaagtcaaggtgtaaagaaggatggcagaaccccgagggaaaacctgcgtctgtaaaagtaaaaaggaaacgtggtggagaaacaggcgtgctcatctcagctgctcagagtacagagagtgccaaagggaaaagcgtacaggtgagcacagcagctgtctccatagtcatctaagtgtccacagcaagtacaacgagactgtacatgaatccatacatcaaaacacagccgagcgcagtggctcatgcctgtagtcccagcactttgggaggtcgaggcaggaggagcacttgagcccacgagtttgagacaagccttggcaacacaatgagaccctgtctctacaaaaatgtttacataaattagccaggcatcgtgcagtatgcctatagtcccaactactcaagaggtgaggtggcacccaaataggaagagaggaagtcaaactctccctgtttgcagatgatatggttctatacctagaaaaccccacagtctctgcccaaaagctccttgatctgataaacaacttcagcaaagtttcaggatgcaaaaccaatgtataaaaatcagtagcattcctacacaccaacaacatccaaactaagagccaaatcagaaacacaatcccattcccaatagccacaaaaagaataacatgcctaggaatacagctaaccaaagaaacgaaagatctctacaatgagaatttaaaaacactgctcaaagaaaccagatatgatataaacaaatggaaaaatgttccatgctcttggattgaaacaacaaatattgttaaaatggccacactgtccaaagcaatttacagattcaatgctacccctatcaaactataccaatgacaatcttcacagaattggaaaaaaagaataattcacatagaactgaaaaagagcctgaatagccaaggcaatcctaagcaaaaagaacaaagctggaggcatcacattacccaactataaactacagtacaaggctacagtaaccaaaacagcatggtactggtacaaaaatggacacacagacccatggaacagaagagagagcccagaaataatgccacacacctacaaccatctatctgatctttgacaaagctgacaaaaacaagcaacagggaaagaacaccccattcaataaatggtgctgggataacaggctagccatatgctgaatattgacactggaccccttccttacaccacacataaaaatcaattcaaagggctgggcatggtggcccacgcctgtaatcccagtactttggaggccgaggcaggtggattgcctgaggtcaggagttcgagaccagcatggccaacatggtgaaatcccatctctactaaaaatacaaaaattagccaggcatggtgacgtgcacctgtaatcccagctactcaggaggctgaggcaggaaaatcacttgaacctgggaggcagaggttgcagtgagctgagatcgcgccattgcactccagcctgggtgataagagcgagacttcatttcaaaaaaaaaaaaaaaatcaattcaagatggattaaagaattaaatataaaatctaaaactataaaaaccctggaagataacctaggaaataccattctgaccataggtcctggacgagacttcatgatgaagacagcaaaaacaattgcaacaaaaacaaaaattgacaaatgggacctaattaaactaaaaaccttctgcacagcaaaagaaactatcaacagagtaaacagacaacctacagaatgggagaaaatatttgcaaattatgcatccaacaaaggttgaatatccagcatctataaagaacttaagcaaactaacaagcataaaacaaccccattaaaaagtgggcaaagaggccaggcgtggtggcttacgcctgtaatcctagcactttgggaggccaaggagggtggatcacctgaggtcaggagtttgagaccagtctggccaacgtgacaaaacccatatctactaaaaatacaaaaattagccgggcatggtggcgggcacctgtaatcccagctactcgggaggctgaggccagagaatcgcttaaacccaggggatggaggttgcagtgagctgagattgtgccacttcactccagcttggacaaaagagcgagactccatctcaaaacaaagtggacaaagaacaagaacagacgcttttcaaaagaatacatacacatggccaataagcttatgaaaaaatgttcaacattactatcattagagaaatgcaaatcaaaaccacaatgagacaccacctcacaccagtcagagtggcaattattaaataaaacaatacatccgtgtcgcgtgagaaattcgaagaaaaaaattaaaagtcaaaaaataacagatgctggcaagggtgtggagaaaagggaatgtttatacgctgctggtgggaatgtaaattagtttggccattgtggaaagcagtgtggcaatttcccaatgaatttaaaacagggttatcattcaacccagcaatcccattactgtgtatatatccaaagaaatataaactgttctgccataaagacacatgcacacatatgttcatcacaacactattcacaatagcaaagacatggaatcaacctaaatatctttcagtggtagagtggataaagaaaatgtggtacaaacataccatggaacactaggcagccataaaaaataacaaggtcatgttttttgcaacaacatgaatggagctagaggctattattgctaagtgaactaacatgggaagagaaaaccaaataatgcatgatctcacgtggacataaagaggaaaacaacagacagcagggcctacttgaagagggagaggatcaaaaaattagcctattgggtactatgtttatcacctggggtgactaatctgtatgccaaacccctatgacactcaatttacctatataacaaacctgcacatgtacccctgaatctagaataaaacttttttaaaaataagaggctgaggcaggaggatcacttgaacctgggaggttgaggctgcagtgagctataattacaccactgcactccagcctgggtctctaaataaataaattaaattaaaacaaaagactacacagccatgttggcatagctatggttcatggacacagaaatatatatatgctaacctcaaaacaaaaaactactattcaagtctctttatttaaaagaaaaagactgtgtttctatctatctgaagaaagggaagagtcaggatgaaaatctcaaacaacagtgataagctctcagcaatagcaggatgtcaggtgattaattcctttgtatgtttctgcattttccaatttttcctcacaaggagttgtgctatttttacataggaagtaacagcaagagagagagactgagaaagagagggagaagaaaaaaaaaaagaaacaaaaaaaagaaggacgaagaagaagggagaagaggaagacattgaaagattgatacgttaattcatcgctttctaatactctggtggaaaaagagcacctgtttaaattcttcataaatctctgtagttgccttgagtgttggaattgagccacacaataaatgaaagatggtactcttcatgtggactgcagaaaaggatttcagagttaccctaagcctggctcactcaaaagcccaagaaggagaaacggcaccaagaaaaatagcatcagaacataagtcggcagaaaacttctgcttttttttttttttttttttttttaagactagctctgttgcccaggttggagtgcagtggtgtgatctcagctcactgcaagctccacctcccaggttcacgccattctcctgcctcagcctcctgagtatctgggactacaggcacccgccaccacagccggctaattttttgtatttttaatagagacggggtttcaccttgttagccaggatctgcattttttgatacaatgtattcctgacccacaggagccacatgggacaaattccaccatgacaggtgcaacagtgaatctaatcttccaaatttatacactatttggtatttgatattttttgtcttacttgaaatttcaagaaaacatttaagatatgcaccaactctcagccaggcatgatgctaactgtcaggaatataggtgtgaacaagacacaacagctgtgtgcacccagctcacagctgagggaaagaagagcaggccggtggggagagggccaggaatgagaaggagccccagtaggaagcagagtgaatatctgggtgatcttaccatcttctgacctcacgatgtaacctagctggttaaataccctgtgcagggaggttttaggagacagtcgaccaggccgctgcctccatactaccatgctgatgtaactatgtatgtggctatgagcccttctgcaattccttataagccaaatacaaaaggagtggccagggccgggtgtggtggctcacatctgtaatgccaacactttgagaggccaaagcaggcggatcatgaggtcaggagttcaagaccagcctgaccaacatggtgaaaccatgtctctactaaaaatacaaaaattagccaggcgtggtggtgcacgcctataatcccagctagtcaaaaggctgaggcaggagaatcgcttgaacccaggaggcagaggttgcagtgagcagccgagatcacgccactgcattccagtctgggcaacagagcaagactccatctcaaaaaaaaaaaaaaaaaagaatttgctgacttctacatccagagccgaacatcctgtcacgcattctcaaaacgctgaacgttcctcctccccctcctcttcctcttcctcattcctctcaagagtacagaaaaaaagtggggtagtgggagggaacactgaagagcagtaggtggataggtccaggagccaaactcacagaccacagtaaagactggggaagcacacacagagcatcagagcactgatggagaaaaggccgagcttcctgagatccaggccctgcacaggagaggctgcccgggacacaaatggcccatcgcacagcaaggctgagcttcctgagggccaggccctgcacagggtaggctgcctgggacacactcgcccactgcacaggagcacggtgcaccgccaaggccacggttgggatggatcttctcagggccaacgctgggaccagaatgcagaatggctgcatgttgtatacacggagatgataaggacaggcccgagttgtgaagaaagatgttatgtttggttaaattaaggcagaatatggcatagaaatctttttgtgatatttccattgtaaaagtgtagttttaaaaccccaaaacctagtgttaagtcccaggtatcaagaaaatcattataccttggtattcaggacagtgaagattcatgatacttattataaaagaaaatatactagagtgggtggcccacacataatttaaagtatgtgtctaaaacagaaaggaaaagaatcgcacccgctccctagtcctcaaaaaaaaaaaatgcattcagaacaggttccccaggacctgaactcactctgtctttatcgtctgctacatcacaaagaatgtcatcaaggtctagtattcctccatctccatgttccaagcgatgcacctgtatccagtagtttggatcctatacgaaagaacagaaacactgaatatagcaagttagcatcaccaaaagggaattagacattttaaaccgtgataacttcctgcccataaaaaggaatcaacctcatatcaacaatactgcaactgattaaaaattcagacagcaccctaagtttggtattgagtcactgctccttttatgatggagtgactcatacacactcttccctttggctctgatgctgatactctattatgataggaactgcacaaacctgcaatatgtactgcataagtaatactgatttctctaaagcatactagatttcctattgcccaatatatgaaatacttattatacttattaacccccaatgcaatctacagaaatattctaataagcaaacagcatatattatgtgtctgaagaatttgtatttttgcttatctgcaaaaagtagtttgcacaccctggtggctccaagtgtttcttacaaataggtctaaagatagggacacagaaggatgctgacaagaccgtagtgaacaaagcacatcctgtgtggcttgagcctctttttacagagacaaaatgacacacacacacacacacacacacatattaaaatgcgtaaacacacacacacacacacacccccctcaaaatttgcagtggttatcctgcagtgggattgaggagaaggaaaaaaaaggacatcattttaaattttatacacttctatatggtgtacgtatattttaaaatccttaaaactctgctttcaaatgatctgaagaagaaacatagttgtgtgtttctgaacttctacatcactcttacgtacatattcagatgaaaatatactaaattgcatgtttcaccattccctactgctttcattctgcaacacaattgctatccagaagttcaatcctccattcttcatacctaaagatgatgtttgatacagttctttcctgaagcaaagattggaagaaggaggctaatgattaatgaagagttaaaatacagattcctggaccctgttccagatctactgactaagaccctggagcaggggtgcggggagaatccatattattaagaagctctccaagtccatctctaacaaagcatgcctaagtatcactgaaacggaacacttattttaaaaatgcagaatgaccaatccttgtcactttttaaccagcacagcaagtaactcagaccttaatcctcaaagttattaaacattaccgttaaaaccattttgcaagtaacagagttcctctgcaccctcatctatctggacctctatgaaaggaatcatttatctagaacacagagagtaagtttgtaaaacaaacactcacacacacacacacacacacacgttggcatcctcttcatttgtggggcctattctgactgcacatgaatcccaattacaacatcatccaggagtccctgggacacctgccactgagacagctccagaatttggcatctccagatgtgttgagtccccaaagaatgaagtcccaaaaccatttactgatggtaaatggtatttcctcttcaaggaaaattggaaataatgtcctgggggtgaataagaaagaggtgtcccctggccacttagaatagccacatcctgcccacctcttcccaccaagcaagctcaagggtgacccaatcaacttaaatatcaactttcgtttctaaaatacttccacacacacaagcacaccaacctccaaaatgtggcttatgaaaccattctttaagcctcctaatcctgttcactccctccagatgagatcattatctgcagcctttatataatatttgtagccaccccttggaaataaatccgcacctatggactttctcaacctcataacttcatccttcagaacttgctacatttccaccttttccccagcactttccctttcacagcctgttaggccctgcaccattttccccccactctgtgcccaaggcctccaatgcctggaccacaccttaccctccaggccagccctgtctgtccatcaagacttctcaggcatcctcttctccaagagcttttcctgaccatcacacccccaaagcagatcagcagtctaactccagcccactgttttcttttgtttagagacagtctcgctctgtcatccaagctgaagtacaatggtgcaatcatagctcaatgcagcctccaactcctgggctcaagcaatcctcccacctcagcctcccaaagtgctgggatgataggcatgagccactgagcccagcctgtcccactgttaatgttcctaaaaaccacaatcgtatggaagatagagtcaggtgtcaagcgtgagcctttaaaggctgtgaattatttttacatatgcagcacaaaaccttttgttgacactactttaccttccggttattataccaattctttgatgatcttcacagcaaattttttttaaaaattgtctatacttgcttcaagtgtgtcttcctcccataaccccattccaatcaggcttcctcttccatcatatccacagcagcctccacgatgcttaacacaaaagtctgttgtctgtcctcatcttatttggtctatcagcagaatatgttaccctctctttgaaatactctataaacttggcttgtaatcctccaactaactgatcaaggcttttctaattttgagagtcaatggttgactcctgcctccggaggggtcctgactcaacagtcagctatgccaagcaatcatgataacatcatgccaaggcaaatatcaggctgccacttattaaatgccactccacaaaaatgtgctgaatggatatgacgttttgaaaagaactgagcaggagatcaacagtaaccccaacagagcatgctgcattaaaaataaaaaaataataaataaaacataaaaaataaacatataaaaatgacctcctcccacaagagtttaaaaaccaggaaggatatttttgccactgaaaaatacaactccgtagaacagtggtctcttgggaaattttaactggcagctttcataccataattctctttcaatgaacagaggacttgctttattttcaagggaagagtccagtatccagtgagaaaaagttagcgcatacttattgattccactttgtagtagtttgcattaaaaagtttaaaataataacagtaggaatctctactgtccagtccatagacactcagaaatgtagctgagcaaaaaattgtgataaggtccggcatgatggctcatccctgtaatcccagaactttagaaggccaaggcatagtgacccacacctgcagtcccagctaattgggagactaaggcagggggatcccttgagcacaaaaattcaaggctgcagtgagctgtgattgtatcactgcactccagcctgggcaacagagtgaggccccgtctcttagggggaagataaaagttatgataagccactttttatactaccaataaattctaattctacaataattgtatcagtcattgggtgaataaacaaacatgacagaacattcaactaaaaaagaagaagaatgtttctcattcaggatatgtccatttaaaataacaaaagagttaaacactaacaataattgtgtattatgacaaccaaaagtccatcacacacagcaataaacgaggggcagagttcatccatcaaatagatgatcaagcagtgaatgtcctcatggggcaaggctcccaaggataggtccaaacccaccgaagaaacctggagacaaaaccacatgaagaatcactgctcttattcagataaagaacatcaacttcaccttgcctagtgctagacaaaacatttcctaagactaagaatggaagcagaggtaactctacaagatgcaagttgcaaggaatgctgaggcccactctactccaggatgtggtaagagaaaacagtgcaaagtcctaaggcgagcttttgtgagttatgacatgtataatgcataggctccgcatattacccacatgtgcaaatttcaagaaaagtatctgcaactagaaatagcaccctactttttcattaaccatggcatacagcaatggtcaatatcctgtctaacttaagaccagaaaaagatcactgaaaaaaatctatgttgataaaaaaaaaatttgagtatttactacatgcaaagcattgcatgaaggcaaagaaacaatcatcacccaacatcagaaattaaaatttatctgacaggccaggcgcagtggctcacacctataatcccagtactttgggaggctgaggcaggtgggtcacctgaggtcaggagttagagaccagcctggccgacatgatgaaaccctgtctctacaaaaagcataaaaattagccaggcatggtggcgtgcgcctgtagtcccagctcctctttctcctgtagtcccaggagaatcacttgaacctgggaggcggaggttgcagtgagctgagatcacaccactgcactccagcctgagcaacagagtgagactccatctcaaaaataaaataaaatttatctgacaaaatataagtcataaaaaagaggtagaccacgtgttcaaagaaaactacaccaaaaaaaaaatgttttgtgaattcaggaaggaaagatcactctcacttggaaaggtcttcatggggaggttttagcagaatgagcagaccagagggacagggcacaagaggaggaccctgagcagggggaagggtgtgagcagcagggaagaatggcagaggtgattcagaacgctgtgaacacaaagataaaaatgaaagggtaaaaacatcatatcaaaaagacacacttatttttatttcctactgaaagcccactgaaaccacaatacacgcggggatgttgttgttgttgttgttgttgttgttgttgttgttgttgtttccaagcataatcgcacaaagacaaagagaacagagggaaatgagggaaacacagtttttggaagctgagaagcagatggcccagaggcgacacattttgcagaaccaagaaagggaaccccaaggtaactgtggggaaagccaagaagcagcaagacttccccaacagagccggtaagaggctctggaatggggagaaccaagaatgtcagaacaccggaacaaggatgggaaggggccaggcacggtagtttatgcctatactcccagtgctttgggaggcagggacaggaggatcactcaagcccaggagctccagactagtctggggaacgtagtgaggccccatctctacaaaaaaactggaaaaatcaccaacgtgtggtggtgtgcacctgtgcccatagtccagctacttgggaggctaaggtggaggatctcttgagcccaggggttcgaggctacagtgagcttgtctctaaaatataataataaaacaattttggctgggtgtggtggcttacgcctgtaatcctagcactttgggaggccaaggtgggtggatcacttgaggtcaagagtttgaaaccagcctggccaacatggtgaaagcaagtctctactaaaaatacaaaacaattagccgggcatagtggcgggcacctgtaatcccacctactcaggaggctgaggcaggagaatcgcttgaacccgggaggcagaggttgcagtgagctgagattgcgccactgcactccagcctgggcaacagcaacactccgtctcaaaataataatgataataaaacaattttaatattaaaaaaaaaaaagccaggcatgatagtgcatacctgtagtcccagccacctaggaggctgaggtgggaggatcacctgaccctggggaatttcaggctgcagtgagccatgactgcgtcactgcattccagcctgggcacagtaagaccgtgtctcagaaaaaataataataataaaattaaaataataataaatgtaaaagatgggaggaaaaataacaatactgtctgaaagtctgtagtaattaaagccccagcttcccaatgcttccagagagcacagtgactgcccctcccagcccctggcggctcactgcaggctcagacagcaggtctggactgagaaactagaggaggaacaattgtagaggtgccttgttgaaaatgagaggagccaagtgaatatttacgtactgattacagaaaaatccagccctctgcttccacttgctctcagaatgccagccagggcttatccccccaaggctagaggtgggaagatctttccctgggcctctatccatctaaagagaaaaggcaggggggaatctggcccagtccagggaccacccagtgaagctcacagtgtacgcccgtgcctgaactcagtgctctcaagttaccattagtgccttaggtcagagccaaccatggagagacagacttttaagaacaccccaaggatggaagagagaacaaaacaaatagtaaacacaacttgaaagaaccagagactgtataaaaagatgctactaaaaatccatcactggtatcctgagagaggtcagatggtggtacattcaggttgcagaggaatatgagaagggaggaaagcaagaaagaaagaaacgtggtgagagagaatttttttaaaaaaagtattttggaattaaaatatgaaaaacaggccaggcacagtggttcattcctgtaatcccagcactttggaggccaaggcaggtgaactgcttgaggccaggagtttaaggccagcctgggcaacacagcaagatcccatctgtacaaaaaaaaaaaccataaaaataagtcaggtgtggtggcatgcacccacagtcccagctactcaggaggctgaggcagaaagactgcttgagcccaggagttcaaggctatggtgagttacgactgggccactgcactctagcctgtgtgacagacactctgtccaaaaaaaactaaacaaaatactaagagctcaataggaaaattaagagaagttgaaaatatctcccctaggaagttggaaaaaaaaaaaagacaaagaagataaaaaaggctaataataaaattagaccagtcaagtaagtcaagcaacttgaataacaggagttctagaaaaagagaattgggaaaacagagaaataaccaaaaacaatttcaacttaattccccaaaatgacatatgtttccacattaaaaagttccatagagaccccaacacaatgtataaaagcagacatacaccaaggcacatcagaacacagaagaaaaacagaagattggtggggggaagggaaggagaacatccagaaaataaagcacaggccacagtgagggaaaaggagtcacagcaatactggaatctagacaatcatctaccagtgacttcaaaactcctacaagaaatagtcccccatcctagaattccatttcttgcccaaataccggtaaagtatgaaggtagaaaaaagaccttttttagaaatgcaacgtttccaaaaacattacccctttgtaagtggaagatgtgttccaacaaaataaggcaataaaccatgaatgagaatgacacagcatatgaaaacaggagacataacacagaagacagctcccgggacgatggtgaaggtggatcccatattccaggacgtcagctgcaaacctggagcagagtgaccagtccagacaccccaaatgtgacctcttcaaaatggcactgaaagagtacccaatgcaactaaacacagcaagacacaattttaacaactgactaaggctaaggctaattagttataaatgtacagaagatcaaccaaaggaaaaaacattcctcatttcaggaaaaacacaaaagttgtgaaggaaagaaaaggtgatcaaggtatcatacatggttcagctgtaagtagctttaataataaaaataatgtgaacctagaatatttaatcaaatttgtaaccatattttgtaacaaagtggtctaaaaagtaagtgtgacagagggaggagaaaggcagacacaaacacacacaaagagacagagatcctagaaatggctacctgtgagtgggggcatagcacacatacggtagtgaaatagggttaaaccttccatgttaactcaatagatgacaaacaacaagaaaaaacaaacgagataagcaatttacataaaaatattaaagtaaatatcaaaagaaccaggagcaagagttggaaaaggcaacctctcccaaagaaggctctgctctttttcataacaatcctagtagtgctatctgatcatgtgcacatgtcacattgagaaacacaaagactaaagagaaacaagtttgaaaagtcctttaaataataaccatggcacacagtttacagtttagcatccaccaaccagattagccacatgatagttaagttaacaagacaaataaagtcctagttagtgatataacaaatagaaaacatttcatttttttgttttgtttttaaaaatgcccctcagacttctaaaacacttcattttaaaaagtcaacaaaagagcacgatcagcaggaactatgcttctctctagattctctgggtaactctccaatttatttaagccaaaaacaaacatttttagaatatattctgaagttctgttcttaaaaaaaaaatgaatcattagcacttcaagatagatatcacacatgcaattctgacttttcctgatttaatcagcttcatttttaaaaatgctgattggccaggtgcagtagctcacgcctgtaatcccagcacttttgagaggtggaggcaggaggattgcttgagcccaggagttcaagaccagcctggccaatgtagggggaccccatctcacaaataagttttttcttgttgttatttttggttttttaattagctgggcatggtggtgtgtgcctatagtcccagctactggggaggctaaagcaggaggatcacttgagcccgggaggtggacaatacagtaagctgtgatcataccactgcactccagcctgggcaacaagttcagaccctgtctcaggaaaaaaaaaaaaagccaatcttttccaataaactgaaacataggacccatcttcaatcttgttacaggaacactgctaaacattatacaaatgtttgtgttgccttctcaatacagggagaagacagacagtcagatgtcatagctgatgttcaacaacaaaataatgacctgtatcaccacaagggagggactaatatctcatgctaagtacactgctcggcccccattctccactccaaaccacacccaataccaatgccaaaacctcagcaccacaacacaagacagagcaaaccacaaacctgctgcctcccttgacaggtggatagcttcatttatctcatcaatcaaaagtgaaaatggaggcatgaaaccaggtgaagtccaacctcaaggaaataagtttctggcatttagtcttattagaactagcacataatctctcacagggtcacacattattcaataatatgagaaatcagcccatcgatgacctccaagatctgacatgactttcatgccaacacaaagtcatggaagtccttcaactcctccaccattctacagaaatgaagggaatggcctcagactacagcgctggcacaggacacagccaaggcaagaatgagacagcagtaaccaccagttagatctgcactgcattttacaattttaaaaaatgcattcatgtgcattatctcatgtggaaagagggcttataattcctattttcagaggagagaactgagactcagagagcataaatagccggcaagaggtcacaattcataaatgctggcagccaggactccagcccaggtctgctgatttattcccaagtcctttctcagactaacactggcagtttccaatctgaagcgtcagggttgcttgtcttctttccacagcccctcctcccagcctcttctcaacagcttcatttgttaatacagtacataaagagaagatccaggccaggcgtggtggcccacacctgtaatcccagcactctgggaggccatggcagattgcttgagttcagagggcctagaccagcctgggcaatatggcaagaccctgtctctataaaatacagaaaacaaaacaaaacaaaaaaacttagctggacgtggtggcaggtaccagtagtcccagctactcaggaggctgaggcatgaggatcacttgagcctggaaggttgaggctgctgtgagccacgattgtaccactgcactccagctggggtaacaaagtgaaaccttgtcccaaaaatcaattaaattaattaattaaaataaaaagacgagatccataaagtattttaataaaaagggccaggtgttgtggctcacgcctctaatcccagcactttgggagggtggggcaggaggatcatttgagcccaggagttagagaccagcctggacaacacagtgagatcctgtctccacaaaaaattttaaaaattagggctgggttcggtagctcacacctgtaatcctagcactttgggaggctgaggtggtcagatcacttgaggtcaggagtttgagaccagcctggccaacatggtgaaaccccatctatactaaaaatacaaaaattagccaggtgtggtagtgcgcacctgtggtccgagccacttgggaagctgaggtgggatgatcgcttcagcccaggaggtcaaggctgcagtaagcagtggcgtgccactgcactccagtctgggtgacagagtgagaccctgtctcaaaaaaaaaaaaagaaaagaagaaaaaaagtgttggctgttaaaaccaagtctgaaaagccacaccatgaaaaattctattacatgttctaatcacatcatgatttaaagtggtggttctccaagtgggagtccaggccagcatcacctgataatacactggaaattccaatcccaagcgggatacaccaccaaaaaaaaagtctctggaggaaggaccaaccacctatttatacatttaaactagccctccaggtgtttctgatgcacactgaggtttgagaaccagtgattcagaatgaggggcgagaagagatcagagaggaagctgaaacaccttgtgcctcttctatacactacgttttagcccaacaactcgtgggtttagtgcttctatccaaacttcggaaatcaaacagatgttagctattacatctttaaaatggttaccatgaacacacacacacatatttgtctcctataagcatacagataatctcagtgttcactgtcagagtcctttctcagtgttatttcaactccaggctctgtgcaggggattgctaacgccacatctttagaccagaaccctcccagcactcccacttcaaacatccacctctcactgcacctcaccctgggagcagtctgaatcctccaaggagcttgttttaaaagcctgccaggaaatttttatgcaacaaacaaaagaatacccatttgggaattacttatgactggacaatgtttttatggagtcctattttacttcaaatagataaagcttatattccttatcttccctctaacaccaacttcctgccttcttcattcctactgatagcagcatcctcctgattgaacctaatcaaaacatagcctcacttcttctttacaggaaatacaggggatagagaaccaaggtaaacaataccataaggaaacaatcagacaaatccagaatatgagtttttctttgttttttgtcttgtctttacaacgcaattgcactgatctttaaaggaaaaaaaaaaaaaagtccacttcgtctgatatctaagtgcaatgtatgatcctggagtggatactgcatctggaaagaaaaagtactatgaaaaaggaaaggacaactgaagaaatttgtcaaattaagttaggtaatggaatgatacattggtaagttttctgaatgtgatcattgtactagttatacaacgaacagtcattttttgaggaaatgtatgcttaagtaataagggtgagaagtgttataatatctgtactttagtctcaaatggttcaggacaaaaaaatgcatactattactaatgtgtatctttatgtttatagagatagaaaaacaacgtagcaaatgtaaacaactggtgaatctaaagtatcagtggtgcatttcactaaagtgtacattagaaatttttcaagagaaaacgttaaaaatatgtcattaaaaaaataacctggggacttttctagatcaaaaagattaaggaggaatatccaaattcaaggtgtgagtggtgtttgggtccttgctgggtttaaaaaagaagtcactgtagaagacatcttgggaacaatgagggaaattttaatatgagctcaatatgagataatattaggaaatgattcttaattgtccatgtgataatagctttgtggatatttaaggaaacacccttattctaaggagttgtgttctgaagtatttaaagtgccatgtctgcaaatagtgcaaaaaaatacacacgtacacatatatgtacatgtgcacatgtacatatacatataaacatacaggtgagaacccctaacccaaaatgcttgggaccaaaagtgtttcagatttccatttttttcagattttggaatatttacatgcacatgagatttctcgaagatgggacccaaatttaaacaaaaaaagtcatttatgtttcaaatatgccttatacacataaccagaaggtaattttatacaatattttaaataattttttacacgaaaccaagtttgtattaagtccaagtttgtgttaagtacttatgtgtggaattttccacttgtggtatcatgtcagggctcaaaaagttccaatttgggagcatttcatattttcagataacagatgctccacctgtatacacacacgcaggaataaatatgtattattaggagtgcgaacaggaaaatgcaaatcatctcaagtattttaaagagagggaagttaatacaaggaactggtacaaagatttgtaagaagagtcgtgactctaaaccaggatggtggtggaggcgggggccacacacaggttagcagtagcaggaagctatgactacccctgggctgaggggataaggggaggtagcaccagagcccagggtggcggaagtgggagccatggaggactcaggggcaggagctggaatttggggagagacttgtttgctgcagagacacagcccaaaacagagagggagaagggaactactttggggctatgtcatcccggggcctcctatctcccaccaaacctcccactggccaaacccaaccagaggtcaactgacacagctgtgctttgtatgattctctcagctactatttgagtttttcataacaaattgggaaaccaaattaattttaaacaaatttaatgacccagggttcatgagaatacaggaagccagcattctcacacactgcgcctgagtattttgcacacatttttggagaggcggggggacagggagctagaatttggtaccacgcatcaaaatgcttaaaatgaaatatacccattgatccagaaatttaaaatgtggaggaagatacatagccaagatgcatatattaaatgggatattttaatatataacaatagagaatgggaactagctatacacgtaaaaacaggaaacaggttgaacacattcaatcaattaaacacaacagagcaattcacaatgttgttcaccgactgttacataagactttgtttcatccctagtttgaagaatgtattatctacagccatagacaaaagaactgctatgcacaactggcagtgcttgtctatatttcctggcattccataataaatatatacgtgcagttttaaatatttatcctcttaaataactagtgaatacatttctttctttcccatctcttcctctcctgttcccaataaaatgactgtccaattcacttctagaccccatctcttcaatcctgtgccacatcttgctacatttatcttcacaaaatattccctttatcatgtgactgtcctgtaatatgagtcatttccaatgactcactactttctaaaagtcaaaatccagtgttcttggccaagcactcaaagctcatcccaagccggtttgtgaccagcctcagcgttgcctcaccgtatttcgatgttcaattgttctgttcactgataaaccccaagcacccaaaacagtgtctgagacagagaagatgctcaataaatactggtcaagtgaagagacccttatgtttttgtttattctcttccacatatctgcaaagctttcacccccagagttccaactacccaaattgtatgtatcttcccaaatccagtttataaaccatccccttggccggacacagtaactggcacgcataacctcagcactccaggaagccagggcaggagcatcactcgatgccaggaattcaagaccagcctggtcaacatagcaagactccatctctataaagcaattaaaaattagccaggtgtcacggtgcacacctgtagtcccaggtattccggagactgaggcaggaggatcacttgagcccaaaaattcaaggcagctgatgaactaagattgcattgccacactccagcctgggtaacacacccaaacccctaaaaaaaagtaaaaacaaaaactccccctccatgaaatgtgctccaactctgaagtatttacctaggccaggtgcagtggctcacacctataatcccagcactttgggaggccaagacgggtggatcacttgaggtcaggagtttgataccagcctggccaacatggtgaaaccccacctctactaaaaatacaaaaagctagctgggcgtggtgatgggcatctgtaatcccagctactcgggaggctgaggcagaagaatcccttgaacccaggaggtgaaggctgcagtgagccaagacggtgccactgcactccagcctgggcacagggcgagactctgtctcaaaataaataaatatttacctagaacacatttgtcacttaatagcctatttcctgtatatgcatggtaatttttttactctagataaggtctccaaaggcaggggccatcttcagctttttttagcatagaacaaacaaagcactgtgttgcataactagtgtgtcccagaaaaaaataaaaataatacccctattgggtataggaaagaacttacacaagagtttctaggagaatataatcaacaaacacaggcctatgctctcctagctgccaaaagaaatgcgtggacatgccaggccatgtcaggatcaacgcccccattcaccctttatcctgtccctcagagctggctcaagaaatgctgtgtgattattctagtttacattccaggaaacatttcagatgtggggaaagaagacatccagacactcttcccttgcaatgaaaacgaacccaacttgcaatatgaataccttcgtcctcacctgcagaggtgggtccccagtgtgactggccaggaatcttaggcagaagaagtgagcttaagccccgataaatatcttactcataccccagaaaaaagagggcaagccaaaactcaccttggccaacccagttctcctcactctagtcccgatggatctaagagtgtggaagggtacgaacagtgggtagtattgttacctgatgaactggtagacagaaaacagaaggctttactgagggaaggtagtgaatatggaataatccaagcctaagtccctaaaccacagtgtggacgtagctacaggatattctgctccagaactcaaatctgtatctgcaagcttcacaaccatcagcaccatgaaagcaggcacctggtgctgcgcccacctcctaatccattccattccttcaccctcactctgattacagagcacttctgacatgacacctgcttttccatgtgacaatcctgcaagatcaatgttttcaactgtattttgtagaagaagagactaaggaataggacacttgacttgcctgagatcaacaccacataatgtcacagtcaagcatagcttaggctcagacgctaacctggaaatccacattttccctttaggacacactgattcttccaagaagtttgccaaggtgacacattaggaagggagacactgtcgcaacacccaagataaaaggccttttttaagggggtacacatggacataaagatggcaacaataaacactggggactactagatggagaagggagggtgaggagatggttgaaaaggtattgggtactatgctcactacctgggtgatggaatcaatcgtaccccaaacctcagcatcatgcaatatacccattaacaaacctgcacaagtatccctgaatctaaaataaaagctgaggccgggcgcagtggctcatgcctgtaatcacagcactttgggaggccaaggcaggcagatcgctttaagtcaggagctcgagaccagcctggccaacatggtgaaaccccgtctctactaaaatacaaaaataaattagccgggcatggtggcaggcacctgtaatcccaactacttgggaggctgaggcaggagaatcacttgaacctaagaggtggaggttgtggtgagccgagattgcaccactgcactccagcctaggtgacagagtgagactccatctcaaaaataaattaattaattaattaaaagtggaaattatttttaaaaataaaataaattttaaaataaaaaccttttcttcttagaacagaaaaaaaaatggaatagtgaaagctgtatcatccaccaggtaatatgctagactaatttcactatgaagaagtcacactttgcaccactttgcctatcacagataaacaatctaagacgcattccattccatactccaggcagtgctagattcaaagctgtagaaagaacaaccaggccaggtgcggtggctcacacctgtaatcccagaacactttgggaggccaaggcgggagggttgcttgaggccaggagttcaaaaccagcctgggcaacacagcaaaatctcaatcccaccaaaaaaattaaaaataaaattagtcaggcgtggtgttctgcacctgtagtcccagctgctcaggaggctgaggtaggaggatcgcttgagcccaggaggtcaaggctgcagtaagctattatcgcatcaatgcactccagcctgggtgacaaagagagaccctgtctcaaaaaaggaaaagaaaaaggaaacaaaaacaacccataaacataaaatagggtcacggacatctccaggcagagatctcctgcctctcctctggagaggttacctcctctgaggcctggtaactataatattgggtggtattttaaaaactaactaaaatgttgaatatttctctactatttataaaagaaataatccaaaacaaccaacctggaagaactttaaggttactcatccagcctaagagaagaaagatctaccctctcctgtttacttctccctagcaaacaagagatgttgactcagaccaaaaggaatttttctgacctggaaagaaaagcctcactgaaacatgataaattccaaatggctctgaatcctaaacaaaaacttgaccccgaagtagctccccacttccctgtcacattacttaatccaaaaatgacctgatttttcacaaagaaaggctcccaaatgacttcaacataaagattaattccttacacctggctatatgaaacccaactgcatcagaagaaatactcctacatgaatataacagagtagactattattaggaataaatgaaccctgatgaaggccttgcacctacctctgatttcctctttggagctatggacaaacagttatccaactgcacctcgtggcatctgtacttaaatccagcacaccccacactgcgtggggtccaagttaaagtgccacagcaccccaacatcctaagtgtggcccctaaggggtggatgccataccacggcacagcttagatcacagccacttgtgatctaaggacggaggggcctgttcccaatgtctcctcaggattgctgatgtctgaggtggagttcccatctccttgcaggatactcctactcttggccaagggagggatctatgatggtatcttcaaaagatttccataagatcacagggtgctcctgagtctcattaccacagacatctttgtaagcaaagaacacacatcaaaattttttttttttttttggagatggagtctcactctgtcacccaggctggagggcagtggtgcattcttggttcactgcaacctccgcctcccgagttcaagtgattctcctgcctcagcctcccgaatagctgggactataggcacgcaccaccacagccagctaattttgtattttttgtagagacggcgtctcaccatgttggccaggatgctttccatctcttgacctcatgatacacccacctcagcctcccaaagtgctgggattacaggcgtaagccaccacacctagcctaacctttttttttttttttttaagagacaaggtctcgctctgtcacccaggctggagcacagtggtgctatcatagctcactgcagccttgaactcctggcctcaagcaacccacctgcctcagccttccaagtagctgagattacaggtacacaccaccacgcccagcacatttttaaattttttgtagagacaaggtctcgctgtgttgcccaggctggtctccaactcctggactcaagtgatcctcctgcctcggattcccaaagtgctgaggactgcacccggccctgtgcatcaactttgaggaaagaatatgagcatggactgagccatacacacaggggatgtaccttcatatatgacaagatacaagccatgaagtccacaggatcttcctgttgctcaaacttgttatctgcttgtctatacctcctggaaagccatccctaccccttcccttgcggaaatcttacccacatttcagttcctggctgaaatgtatctctgcaagacaaccatcttcaatcctacttttatcttatgcccagtccccccaaagcacttaaaatgacgtcttgaagatgtgcatgttttaccgtttatcaccatggtgagtcccataggccacagtatgcattcattccacaaatattcacgaagcatctaccatgtggcaggcacggaacaagatgcagggtcatcgcaatgaatgggtcccaccctcctagaatctgtggtctagcatacgaatcaactagagctccctcttaaacatagccctcacaccacaaaacattcactgaagtctgttactggttatttcaagccaaagatcaatttctattcccttgctaacctattttgtttgaaaatctactggcacttagatttttctgaaaggccctaatattatgactcaagactttatctaggccatctggtcagtttcaaatacagacatccatttaaaataggagaattttaaagtacgggctccaagacaccttataaaatacacataaaagagattttatacattaattccataaaattcataattccttacatacatggttagttctctgttcctatattcccttatgagacatttgaaatgtaatgcgtgtgccttcagtttatttaagaaattatggtacatggtgtctcagaaaaaggaagtttaacacaatgcattaaaacagagaatacatcaagcacaaatacaactagtctgcactggtaatattccctaggatactttaaagtttctgataaaatcctgcatggaagcatggaaacaaattagctgtatgggaactcaggcaaaacataattacacaactagtaattaaagtgtgaaatggactacctcaaacaacaataaaacttgtaactataaacttatcagatgggaggaggggacaaaagagcagagtaggttgtgaagcttgaaagcaagcttgtccaacctgcagccccatgggctacgtgtggcccaggatggcttttcttttttttttttttttttttttttgagacagagttttgctcttgttgcctaggctagagtgcaatggtgcaatcttggctcactgcaacctctgcctcctgggttcaagcgattctcctgcctcagcctcccgagtagctgggattacaggcatgcgccaccacccccggctaattttgtatttttagtagggacagggtttctccatgttggtcaggttggtctcgcactgccaacctcaggtgatgcacctgcctcggcctcccaaagtgctgggattacaggtgtgagccactgcacccagcctcaggatggctttgaatgtggcccaacacatattcataaactttctcaaaataatatcagatttttttttgcaatttttgttttacctcatcagatattgttagtgtattttatgtgtggtccaagataacaccacttcttccagtgtggcccggggataccaaaagattggacccccctgctttaaagacatacagataaattgtgtgcagctggtgacctgggccttgatgacaagggcatctagtgagtgcaagccttatctatcagtagccacaaaaaggacaataaaatgactctgtggttaagtggcctgaaactgcacaagtcatttcctctttgtgggcacccaagtccttttgtatagaaatgagggagttggatggtctctggggttcctatattgctctaccagtctatgatgctatatcagaaaaattaaacaaactccaggcagcctttttcccacaagtagaaataaaacagccattcctaccaacacataattagatcttgaaaacaacccataatacaaaattaaaagtacctaatctcctctacaacattctgtattaaacacgcatttataagcatgttcccctgcaatcgcagagttcaaagttctgtagacaccattcacccagaacagctttccaaaccctgagagtctggtggaggtgctggaaacaccataagcaagcaaagtcacggtcccacgcagattactggaaaagccttctaagagcaagaaaagtcaaatatggagaagagcgtccacgtggctactactgactggacacatttctatatttaccatgtactctgacagcagctggggatggcaggatggcatggtgcacaccaccagtgaattaagaaccaaacacccagtctgaaaataattgtgttatgcaataacagcggtacagccaaatctataataaaacccctgttctacaacacttaaatattaatttcggggccaagcgtggtggctcacgcctgtaatcccagcactctgggaggccgagatgggtggactgtctgagctcaggagttcgagaccaccctgggcaacatggtaaagccctgtctctactaaaatacaaaaaattagttgggcatggtggtgcatgcctgtaatcccagctacttgggaggctgaggcaggtgaattgcttgagcctgggaggaggaggctgcagtgagccaagatggtgccactgcactccagcctgggtaacagagactccatctcaaaaaaaaaaaaaaaaaaaatcaattttgggaggcaagccataggtatatgaaaaggtcactaacaatactcagttatggaaattgtaactgccaaccaagcagtacatgaattgagaaaatacagaaaacactaaagacaaagaacgcttcatgaagaaatggtcatttattttcaatcaggagaaatcttaggacaaaggtgaggaggtcaaaacatgcacagtgaggctgggcacagtggctcacacctgtaatcccagcactgtgggaggccgaggccagaggattgcttgaacccaggagttcaagaccagcttgggcaacaaagtgagaccacgtctccacaaaaggcaacataatcagccaggcatggtggtgcatgcctgtagtcgcagctactgagaggctgaggctggaggattgcttgagcctaggagaccaaggatgcagtgagctgtgatcacaccactgtactccagcctgggcaacacgacaagactctactctatctcaaaaataaaaataaattggccgggcacggtggctcacgcctgtaatcccagcacttcgggaggccgaggtaggcggatcacctgaggtcaggagttcgagaccagcctgaccaacatggtgaaaccctgtctctactaaaaaatacaaaaattagccgggcgtggtggcaggtgccttaatcccagctacttgggaggcagaggcaggagaattgtttgaacccggaaggagcaggttgcagtgagccgagattgagccactgcactcaagcctgggggacaagagcgagactcaaaaaaaaataaaaataaaaaataaattttaaaaaaatgcatggtgtattggaacaaccagggaaacagcctagaaacaatacactccatcacaacttgtggtgttgtccttattcatcctttctccccacaatatactgatacgttgaattgagccaggcacatgtaacatctctgctagggatagactagggcagagccctttttagacctgtctgaaaaaagctagtgctcgaatcctaaccttcatgtcatcattaattgtgacgtttgttctaaacaaccttaaagcaatgtaatataccaccaacagaaacatcaaatgtaaatccagaatttgaggtttcaagggaaaaaaagcatttcaaaaggccccaaataaattttaattctaaaattttaaggattatttcattttcttatatcctccctctactttaagttaaatcccttctcatccctccaatcttgtttaatattaatagttacttaatacattcctgagtgcagtgcagcaacacttcctgtttatcaaaagactaaaataaatagcaggtcaacaagactagacaaggaaaacacaaaactcgtttgacaactggggccagaaacatgtttgtatgcatgcaagagaaaccaccacctacctttttagttagacctgctcgatatcatacagcaagcagattatttcagtataaccctcaaaccatgcccctctttccttctcccctccaaaaggacatttaaagccaaccagagatttgggcaatgaatttatgaactttaagttcaagactttcaactttcatattacaatgtagtgatgaatattaccaatgtgatatgattaacaaaattagcacctcctcatatgtgaaatatggtactaaagcccattcttgctgaaaatctaggatgacaaacaactcacagggcaaaacccatgtggttaggtgggtgtttgttttgatgcgaagcctccagttttgttcctgtctaggcctgtcccacagtcatctgacattcctgcaaaaacttgtctttattttggatggacacacaagcaatggaattggcactgaaatttcagcttatggtgcagggtatgttaggatacaatttccccctgaagtaaatactgaaacactgacatgtgggtttgttttgcttttttacttttaaaaatttgcaaacgggcacggcggctcatgcctgtaatcccactagtttgggaggcccaggcaggtggatcgcctgagtgtcaggcgttcaagactagcctggccaacatggcgaaaccctgtctctattaaaaatacaaaaaattagccaggtgtggtggtgggtgcctgtaatctcagctacttgggaggacaactgtttgattctctgaggcagaagaattgcttgaaaccaggaggtagaggttgcagtgagctgagatcataccactgcactatagcctgggcaacagagcaaggctctgtcaaaaaaaaaaaaaaaaaaaaaaaaaagccttggaaataatgccactgtgtactatgccaagaattctagccaggtgcattggctcaggcctataatctcagcactttgggaggctgaagcgggcggatcacctgaggtcaggagttcaagaccagcctgaccaacaaggagaaatcttgtctctactaaaaatacaaaattagccgggcgtggtagcacatgcctgtaatcccagctacttgggaggctgaggcaggagaatcacttgaactagggaggcggaggttgcagtgagccaagatcgcgccattgcactccagcctgggcaacaagagcgaaactctgtctccaaaaaaaaaaagaattcttaacccacctaaaataagtcatgataaagacatctgccagagcatacacaaccaatcataaaaacattccaaaattatgtagtaaggctaaatctaccataatttacacaaaataatttgcctttaatgattttcactctcaattaaaaggcccaatgtcatgatgaaataaaagaaaacacttttcaggctgattagaggatacttggcagaacaatgagctgcattattccagaaaggcaatagaagtatcctgagaatggtgactcgtttgttctaaatctatatcaactattcaaagtaactttgaaaaagcttacctaaaggaatatgatacagagacagaaaatgactcggttatatataaatcttaagcaatgttacgctccttacaaagaccaacagcaaccaaaagaaatcaattccagaactgaagagactgcattctaaaattaacagaattttaatattcaaattaagttatttccttcctgtacctccatcctgtctttgaaaagagttgtggagcgaacagggcgtaaagtaagctatgtgaaaagaagaaaaaccacagagaccaatgccacaggaatgctgaagctgcacacagggtgtgcctgggcagccggcaagctgagggcagggaaggagtctgaccctctcctccaaccccatagccagcgaaaaggcaataccctgagaggggctccagagcatcccccaggagtgcccagcatccacagtgataagctgagtgaccagggggctcaactacttgcagggttcccaagggagcaagaccctgctcttccacattgcgaatcacacacagttcctgtacagccatctcctggagacataagattcccagctctcaccaattatgataaaaataaagtgagatccattcagttatctgctggaagatataactaaagcactaaataccactgctaatctgagttatgtgaaaaatatatattttggggttacaccaataccttcaattaagcatgtactaaattataacatacaaactctaacactagaaaaacaatggctttaatattgtctaaacaggctgggtgcagtggctcacgcctgtaatcctagagctttgggaggccaaaccaggcagatcgcttgagtccaggagttcaagaccagcctgggcaacatggtgagatcccatctctaaaaaaatataataataaaaaacacaaaaattagccaggcatggcgccacgtgcctgtagtcccagctactccagaggctaaggtaggaggaccacctgagcccagggagttcaaggctgcagtgagacatgatggtgccactgcactccagccttgtgataaagtgagatcctgtctcaaaatatatatttttgagacatatatttatatatttttatatatatactgttgttttatgtatatatatagactgtttatctatgtatatatagattgtctaaacagtaacaaataagatttgcccgtcaccacactgtcattcactcttgctatctccagtggttatcgcctgtacagaaatcaaattatagtttacctagtccaagttttaataataaactggctcaatgcttctgcacaaggtcactataaactataatcatagaaaacatccatgtatgtgttttgagaaatgaggactgaagaaccagcctggccacttaatctcctgtgacagcagggtaagatcaggcttgatgttcagcacggtactccctggggatgttccgtctcactctccagggcaggacactttgggcctcacacttcctgcgcacacttgccccacaatcttcttgcctatgctccgaaagctgttgacagccttcatctcaaaaacatttaacttcatatattttgcctcagcatttagaatatcacaaagcattttgtaagccacctttcaaaacacagtatcttctttagaaagtgaggcagaaggcaggatattagtttaatattcctttttgacaaatacatatattgaacatgatgaaatatttaccagtgtaactatctgatatctaagatttatttcaaaatgatggaatggaaatagtgcgagggtacagaagaaacaagattggccaaaaatgtgaattgctgaagttgggtgacaggtacatggaggtatgttattctcttaacaattgtagtatatttgaaattttccctaatgaaagcatatttttacaaaaatatatatattggccaggcacggtggcttacacctataattccagcactttgggaggctgaggtgggagatcacctgagctcaggagttcaagaccagcctggccaacacggcaagaaccctgtctctactaaaaatataaaaattagccaagcatggtggcacatgcctgtaatcccagctacttgggaggctgcggcaggagaacctaggaggcctgggcaacagagcgaggctctgtctgggggacaaaaaagaaatcatatattgacttgaaaggttagaggatgcctttgatttacatgtatccagtaaaatcatacgagaaaaaggccaccaatgatggctgaaacagccagagagacacacagaagcaaagtcactatgtttattatgcatttctgattgcttttttccttaaagaagcatagtgcctttgacttctgtttctgactccccaaattttaaggtcacctctgataagatcataaacttctttgagctcatatcaccaattatttcaaactctgtttgaaaaaccaaaatgtattagatatcaatcagatcatagtaattaatctcagctttatgatgtcagaagacttttaaacttcccattttccacagcttgttccccgcctagggaaaaagctcaatcacttcataaatctggcatcattctagtacactgtgttttaaaatatgctcaagtattgatcacggcgatgcagcggaggaactgcaggcttgagcacaccgcagggatgcaggaccagggatgggggcacttctttaggggacatctgtaatcgcactctgggctcacagtggaagggtgccgcaggctgggagctgggctcctttcactttccagtttgagttctcgtctacacttcactggtggatctgttactgatattaaaacccaaagccaccagcagagagcactcaacgagcacaagcttggtaattcctgttcactgcagagggaaacaggagtgcacatcattaaagcaagaacacattcttaatggaaacttcgtatggagcacagggacagtatatacataatccaaaattcaaataaactcagtgttcgtgagaaaataagcatgtaatcctgaagattctatgaaatgcatcccatattgtttaattatttatctctcagggtatttttttttaagtcaatgcagtatggttggaaactgcattgtgatctatggctttctccatgcaactaaaatagccttgcaagtcatgcccatttttaaaagcttatacaagcacctaccctcttgcagtggtgaagatagcactgtaatttcccttcagttctcttacataactaaagagttttttgttttgtttataagctcatacattggctagaaaaaattataaacttgctggtaaatttctaaacttgctagtaaaaaaattaagttatatataagaggctgccctgttctaatcccaatcaagtatttaaaataattttactatgatcacagtaaacatagcacatagaactaaaggaaatactatagtgaatatatataagctaaactggctagttgtcattaaacccagtaactagaaaactgaccacaaaatatttttgtttttactgttatgttatattattaactcaggacaaaggcaggggtgtagaggtgaagaagagctctggggataggtcaagtcagctgggctgtgctaccacgggcagcagcagtctgcaggagagccctgaacatcagtctactggatgctgtagcccaagtgacaacaacgtaactgcggagcaaatgctggagcagtagaaatgctagagcttctaaaatccgctcagtgagctgattagttacaaatatgaaggaagcatcagctcattcagtacaagcaatggagcctaggaattaacagtgaagactggacatagctggagcaaatgacttaacctctctctgcccgtttccctcatctgagaaatgtgagtaacaagagtcccttactcatagaattgttaaaaggattgaatgagtcaaaactttgtgtgtgtgtgtgtgtgtgtgtgtgtgtgtgtgtgtgtgtgtgtgacagagagagagagagagagagacggagtctcactctgtcgcccaggctggagtgcagtggcgtgatctcagctcactgcatgctccaactcccaggttcaagcgattctcctgcctcagcctcctgagtagctggggttacagatgcctgccactacgcctggctaatttttgtatttttagtagagatggggtttcaccatgttggaccaaggtggtcttgaactcctggcctctaggtgatccacctgtctcggcctcccaaagtgctaagattccaggtgtgagccaccacgcccagcccagtcaaaacttttcaagctctccgaatagctcaaggcattcagtcactgctaagtattcgttgccattctgataagccaggattttcacaacagtccctacttcctcaactgtgaggagtagtgttattcatcgtaaaaatctacccttgggggggcacaatatctagtgtcaatctatctcaaaagggaatgagggaatacatggtggttctcaatcctggctgtatcagaaacacctgcgagctttactaactacacaacactccaaccaagaacaagtgaattagaaagaaactcagatgacacaatgtccagccagcttgggtagctaacaccaggactgcaactgaacaacaaaagttactttgcaaaaaggcagatactttactacacctaaaacattatttgcttgctgtggactagttctactgtcttgagtgaatgcgtttgtgtgttgttgtttttttaatcccacgttctcagtcatgtaacagataactgcagtatctaagcatacatgtctttagaatgccatttggttaaagttctttccagacttaagggagtgtaaaggtaatcaattagcaccacaaggatttctgcctaacatgtcttttaaccatcaacagatgccatataacttcctaaagctcttggctataactacttttatacttagaacaaatcgagttcatgttttactaaaacaaaagctttggccaggcacgatggctcatgcctgtaaccccagcactttgggaggtgggtgaatcacctaagttaaggagttcaagaccagcgtggtcaacatgatgaaactgtgtctctattaaaaacacaaaaaattagccgggcacagtggctcacgcctgtaatcccaacactttggaaggccaaggagggtggatcacctgaggtcaggaatttgagaccagcctggccaacatggtgaaaccccatctctactaaaaatacaaaaattagccaggcgtggtggcacacacccataatcccagctactcgggaggctgaggcagaatcgctcgagcccaggaggcagaggttgcagtgagccaagattgtgccactgaactccagcctgggcgacagagtgagaccctgtctcaaaacacacacacacaaacacatacacaattagctgggcgtggtgacaggcacctgtagtcccagctactcaggaggctgaggctgaggagaatcacttgaacctaggaggtggaggctacagtgaactgagaatgcaccactgcactccagtctgggcggcaagagtgaactccatctccaaaaaaaaaagtggggggaggcgggagcgggggtcttttctgtctcatatgtataaggaaaggccagcattacatctttatactttctcctttctgagcacagacctctgaacttctcctctgaccacagagccctctattgtcagcaactttctacccttttctgtggacagggaatcaagtccagtctttgctttgccaataaccagctgggtaagctcagacaaataaaagctctgcctattccccaacctgtaaaataaaggggaagtacaagatctacaggcaccactgctcttaccattacactatccttagagcccacaaagcatccattccctctgcaccctgtgtggtgggggattccatccttccaatatgtttaaagactttggctcaagagtcacaagctcataagcctatgggagccaggcaggtaaatgagggacaggatgagtgggtgcctgcaagcctgagagcatgaaccctatctaaggaacagctgccactggcggcatacaagcttgctctggcccaggctccccaggtctcaggaagcactgcacgttcccacgttttatgcagcatcttctcaatttctcaggctggccatgacagacatcattaaaacaatgtgttctagccttctccctgcaggcagggcaagcctcataggacccaaagtacatcagtccttccagactgctgacacctgcaagcacaaagaactaccaccttgtactctgtagtcaaaatttatttaactgaagcaagtctgagcacagcaatgagagattgctatgtttattttttttttgaacgacaacaacaaaaaaaacagtccaagtttatatacataatgatttataggcactttgaagcctttaaggttttctttctgctcccggtctctcatctctccattcccaatcacacacactgttgccagaataacattcctccagccctgttacgaaaccccggcctgctggagaatgaaaaggtttccctactgcaggtgaaacacaagtatgcaaccccctccctccaccacacacacacacacacacgcacgcacgcaggtgaaacacaagtatgcaaccccctccctccgccacacacacacacacacacacacacacaccacttccatccaacccctccagactcaaccattaccacatactgggcacaggccttttcagcacccgatatctgacaagcaacattcaacatgtcaacccggagacaatacaagatccttgcaatgcattctggatcaacaagtaggtatattaagtctaatttattagactctaggcatttcgaggcttcacagtatgtatgatgaatctgtaggcaagaaaaacacagagtaaaagccctttattctctattttctatctagttaagaatttaccaaatttaccatatgtaataaaatactgtttttagaaaacactcaaatttaggctcttgaatatttgacaaaattatatactgcttcaaatacatacaaatattcttcaggaagcctgtacattaaatagcaaataaagtatctaaaggattctgacgctaaatgtcatttctgaacgtttttgtaatttagaaaaatagtcacattagcagccagctagtcccacatcttgaatactttcacagaactgcaatgacgcaggggcacttcaggaaaaaaaacaccaaacctctcttcaaccctgaaatgtgccctaacagatgaataataaaaatggaaaatatgcacctcaaagtactctccactttaaactgacacacttgtgtttgtcctaatgctgctaatcagtttccagtaaatatgtcacattgttgtctatttctaagtgctcccaatttggatgaagtcatcccaagcagcagtaaaaggcttttattgcccagcagaatacaaccatttctgtacttgccttttgtttctcattacctagatgtagcagtcaaaaagtccaaattttcaggaggtacattagttttttaaatggtttctcatatttaatgtaatattctaggtttcatatcaggcaaaattatcaagttaatctcatgcagccatgtactgcataacatttcagtcaacaacagaccgcacacagacagtggtcccataagattgtaataccgtatttctactgtaccttttctaggttccgatatgtttagaaacacaactatgtaccactctgttctaactgcctgcagtattcaggacagtaacaggctgtacaggtttgcagtccaggagcaacaggttagaccacacagccgaggtgtgcagtaggctctgcaacctaggtttgtgtaagttcaccctatgatgctcgcacaatgaaactgcctaacaactcatttcacagaatgaatcctccttaagcggcgcgtgactatgaatataaatccttaaaatgctgaatgcagcctacgcttttaaagatatgatgctattggccaggcgtggaggctcatgcctataatcctagcactttgggaggttgaggtgggcggatcacttgaggtcaggagttcaaaaccagcctggccaacacagtgaaaccccgtctctactaaaaatacaaaaattagccaggcgtggtggtgggtgcctgtaatcccagctactcgggaggctaaggcaagagaaccacttgaacccagcaggcggaggttgcagtgagccaacatcacaccactgcactccagcctgggcaacagggcaagactccatctcaaaaaaaaaaaaaaagataagataagatatgatgctataaaaaaggattgttgtgagaatttgaaggattctacatgtaaaatggaagctaaacatctataaatagtagaacttgatttaatatagaagggtctcctacagtaaatgaacctgacaagtgccccaaaagtttccacttaattaaaaatccactaaggaaattacacacacaaattaacttcattatgcagcgagcagtctcctggaggagccggaaaagtaatctgaccatggtccaaggagttccttgtacttcactcctggctgttgtgtacgcatctgtgatgcatccccagggagagattaaatttaaacggattggaaagagaaggaaagatccttccttccgataaaaacacatccaacatcacctccctcccctagaaatcaggggctttcaacaatgtgctttggagaattttaataggttttatagcctgaaccagacctaaagagcaattcattaagaattttagtgtgtttcttaaaatgctcaataaaataaaataatgtctcagggctatatcctcacctaaaatattttataaaggccaaaataaacctgataccaaaatcagacaaatatgtatacatcttctccctcatgaactaaggtacaaaaatcagcaacaatatatcaccaaattaaatccaacaatatataaagagaagtggatggtatacaaaagcaacgcatctacaaatctcacctctctctctccaaaatccaattttttttttcctaaaggataaattaaccagacctggaaattaatgagtttgcagattgaaaagttttcaccaactttaaactgcactgtacagctataaatttacataatgcaggactactttttaacaataatatagaaatcaggggaaatcaatttttaaaaaaacaagatgaagccaaaggcagtcttcaaaatatactccatggctaggagctcacgcctgtaatccctacactttgggaggcccaggaaggaggatggcttgagcccaggagttgtacaccagcctggccaatacggcaagccatcgtctctacaaaaaaatttaaaaattagccatgtgtgatgatgcatgcctgtagtcctacctgtactggataggctgaggtgggaggctcacttgggcacaggagtacaaggctgcagtgagctatgactgcaacactgcactcagccaaggtgactctgtctccaaaataaaataaaattgaaattaataaaaatttaaatttgaaaaacgtactccattaggtcctgcaaagcgagtagacgctgtgaggattccagcagccttaatgagcgcatacacacaaggaaagaaccacaactattcatttctcttgtgaaattcttaaaccaacccacaatttgacccggttatatagctctattagtgtaagtacacaacattgtgccccaaacttaagaatttcacagctacaaacttctacgggcagggtttccatatgataaagatatttgtgcatacttgattaagtcatcattataatcatctgttgaatacgctatgagcaatttttttacgctgttttctctcacctttataatgatcttccaaatcagaaaaaaagtcaaaatataaaattaagacatcttcttttaggaattcttctacagagcaggcctgagtttcaacttgcatggcataaaatgtatgcaaagaaaatgtattctgatatgagaccctcagttgcctacagacttcaatcaactcatttggagagctgttcactacctcttagtcttttcaagtcttattagtctttacacaatccactgacatggacagctataaaagttacacttgctgctctagcgctgactagacaaatttgtagtgattagcacattacctgaactatcattccaagtttgtctgaaagcaacacaaaaacctatagctacatgtcctataaagtttctcataaaatgaccacacttttgaggtcgtaaaataaaagtacttatttgccattaaaatcacagaacttaaagggattgcaaagactctagaggtcaccaacaattgagaaaagttgaagttcaaaaatcaagaagtaatttttttcacaatcaaatagtagttgaatagcaatatccaacattcccatctcctaattccttcttccacagtctcctagttttttcatcatgccacatacagcttaccaaaatctttatttttaatttaaatcacaggaaaggcaaatgctgtaatgagtctgcaaatatttacaagagaggagtgaagaaataagcccactaaattcagtgagacaagtataatgagaaataatcccaaggctcatttttctcagtttctcagaattgataggacaacaataaaaggaagggaagaaattttgcaagactaactctcaaaaagaatagctatttgcagaatgaatcacagctattaatcttttcttgaaaaatatatgacagcagggtgttttccctgtctctaactttaaaaggccggctgccaaagggctattcgatgaaaacattacataccatcattgagatatgcactctttcaacctgagaacgcttattgaaaggtaagaaaaaaaaagaaacgcaatcttctgaaaacattaaactacaaaacagtcacattaacaaaagtacagctaagcctcacaatgcaggtcttctcaagtacatgcaaaagtagtaaaatggagacactctagggtaggaggcctgaagtaaactgcactaatccctttgtccacccccacccatacaaattgtctttgaagtattttgtgagatatcttgattttatttttaaaatacatacaggccaggtgcaatgactgacacttataatggcactttgggaggccaaggtgggaggacagcttgagaccaggagtttgagatcagcctgggcaacacagcaaggctccatttctacgaaaaaattttcttttaattagccgggcatagtggcatgtgcctgtagttccagctgtttgggaggctgaggcgggagggttgcttgaacccaggagtttggggctacagtgagctatgatcataccactgcactccagcctggaggacagagcaagacaatcaatcaatcaataataaataattagtaattgattaatcggtgataaataggtaaatgagttaaaattcatatagaatttacgttacgccataatatttgcctttgcaatacgaaagttgagccttcaaataaatggaaaaccacccctcacaaacccatacctccctcagcaatactcacacccagtgtgaggaacatactggaaggccactacaaatagcaacatgagggacagccatcgggcaccaggcagacgagggacccacggaggagctcctctatgaagactccagtctagtgtctcttccccacctcccaccctctctttgaactccctctctcttctgccctctacaggaaacaaggtgatatcaaaataaaggggtctgggacaaggaaacaagaagctcacctctatcaatggaaaacataaaagtctcactactacaatgaaatatttgcctgcctctacttacactttataccaaagttcaaagttaacaccgttaatcaccatccacaaaagcatgactaaccaagtgaagattaactagtcatttcctgattacaaatggaagtagaattttcccagtatcattgacagtgactattagaatgtgttgaaagtcccttacaatcactcttccaaaaatgctttaagacaaaatttaaataaaaattttattcactaacagctgtccaagattccaatacaaacataattctacgttgtgattaaaaagaaaaattattcagcttaaaaaaacaactagtgacaaacatgattagagttttgttttgtttcttttgagattgagtctcactctgtcacccaggctggagtgcagtggcaccatctcggctcaccacgaactcctcctcccgggctcaagcaattctcctgcctcagcctcccaagcagctgagattacaggcgtgtgccaccaaacccagctaatttttatatttttagtagagacggggtttgagatctgtggggtttccccatgttggccaggctggtctcgaactcctgacctcaggtgatccgctggtgttggcctcccaaagtgctgggattatgggcgtgagccaccgcaccctgccatggttagagtttttatcaggtatttgttctggaaagcagactcaaaattaatataaaccatctttctcaaaactcctaatataaagctaacaccaattcacaaaagaagagagtaaattatgcttctgcgaaagtaaaatcaaagctgtttttttttttttaccataagcagtcatagaaagaacaaagctgttttatacttatttcccattgacaaaattaaccccaaacataacaatcacttattcagaaaaaaaagtgtaaaaagtaaccatatggttttaatgtttcctaatctcctaatttattatttagaatgttaaaacttatttctcaggttcaaaaaaatcctttaaaaaacttttactataatgccttatcagttactcaactactaaaaagtaaattcattatatcaacaaagcactacaaaaaggcatgtgagtgatacacttctgcacttggaaaatctgccaaattcccatcattgaagattacacatataacaaatatatggggccctttttttttttttttttttttttttttttttgagacagagtctcgctctgtcgcccaggctggagtgcagtggcgcgatctcagctcactgcaagctccgcctcctgggttcacgccattctcctgcttcagcctccatagtagctgggattacaggcgcccgccaccatgcccggctaatatttttttgtatttttagtagagacggggtttcactgtgttagccagtatggtctcgatctcctgaccttgtgatccgcccacctcggcccatatggggcatttttaaaataaaagagaaaacaaaaaacttcacatgctgtgttgaaacaactggctttcctattggaggagtgtggggaagaaattaggtccctaccttaccaaatacaaaatcaatcccatatgaattcaagattagattcaaaatgctttctttcattaattttaaactattagatataaaaagagaatatgtttgcaatttaaggtgaggccttcttaagcaagacactagatgttaatacccaaaagccaggaagtttaacatttctgtacaaagtatggtatatgccattttaaaaagttaaacagcagacaaaatacagaaaatatattttcaatgtgtactgcatttaaagttactattacaaagggcttatgggaaaaaaaaaaaaaaaaccccaagagcaaaatggataaattaataggaaattctgagaaaaggatgtaaacatgtgagaaaacagtaaaattccctggtgctaagggaaattaaggcaatgatgatgtagcactttttgagtatatccaaacggacaacagaaaataataagtagataacctagtattcacgagagagatcaattatcttttttagggcaatttgtcaataataagacataagttgtatgtttcttttgctctaagctactcgtagcttccatacacaagaataaagctgtagagatgctatagcactagttatttacagcagaaaatttgagaaaatattcttttcattaaaggaataaagttatgataggttcatatgacaagatattatggaatatgcaataacgattacaggacttctcactagctgcaaattgaaattctgactcaatctgacattgaaccccaatacaactaaccacattcaaagttctgtccctgctccttgaatgatctgttccaacacaacagatctgctgccagtcccaaaatctggcttatattaagcattccatctcctgggcttcatcagcaatgaatatcaaaatgggctaacctacccacatgggcttccaaactttcccgtaagaaaataaagtagatatatgcaatgatttatctgaaaagattctcatcaggccctttgcagtataaaaggaaaaaaaatttgaaacaaccccccttattttttattccttttaaagtaagtggcggatatcagtacactttgcctgtaatcatttcagcaatgcaatatatgtactgtagtataatcccatttttaacagaaatattttttatatatatggtatacactccacttgtgtaatgacacttttcttggagtaataaaaatagagtctcactctgttgcccaggctggtctcaaactcctgggctcaagtcatcaatccttctgccctcccaaattgttcagattacaggcatgagccaccacaccaaacttgttacttttttttttctttcttttgagacaagagtctcgctctgccgcccaggctggagtgcagtggcgcgatctcggctagctgcaagctccacctcccgggttcacgccattctcatgcctcagcctcccgagtagctgggactacaggtgcccaccaccacacccgctaattttttgtatttttagtagagacagggtttcaccgtgttagccaggatggtctcaatctcctgacctcatgatccgcctgcctcggcctcccaaagtgctgggattataggcgtgagccactgcgcctggccctttttttttttttttggtgatagggtcttgctctgtcacccaggctggagtgcagtggcatgatcacagctcactgcagcctcaaactcctgtgctccagtgatcctcccacaacagcctcctgaatagctgggaacacagacacatgccaccacacctagctaaatttttttttcatcagcagacaaagctataaaagaaatgaaacaaaaatagatcacttgaatccgcaccactgtctgtgttcataaagaaagtgacaactacactgaagaaagagttatttcaaaatgttggaaataggttactttattaattaattaatttatttatttatttatttatttatttatttatttactgagacagagtcttgctctattgccctggctggagtgaagtggtgcaatctaggctcactgcaacctccacctcccaggttcaagcaattctcctcagcctcagcctcccaagtagctgggattacaggcatgcgccaccatgcccagctaatttttgtatttttagtagaaacagggtttcgccatgttggccaggttggtcttgaactcctgacctcaagtgatctgcccacctctgcctcccaaagtgctgggattacaggcatgagccaccatgcctggccaaaataggtgactttagacatcccaaaaggtcagaagcaacaaactcatgtctccctccccttttacggttgagatgctccacaatcccaactgagaacagcaagacacagttacagaaacagaaatgagaaagcgggtgaaggggagaaagggggacggagagaagcaggggtctgcagtattgacctggtcccaagaatacggggtgtttatttaggtggttgagcaaatagtcggtgaggtcaaaggtatctcatgcatacaatgtgcctttcacttttcaacaggagccaagggttattctgtaactatgtgctcaggcaaggaagatttcccacttctccactaacaacagtcagaagccaaaagctccactcaggtgcttggctacattttgccttaaaggacagctgaagtggtgcggttacctccaccccaacaaggactaagaaagacgtctgcccaacactatggagccgattttaccacagaggtgaaaatcctatcccctcccacaatgagcattctatttgggggaggcaaaaccacagtgctctggtttgaacatttgtgtcccctccacaattcatgctgaaacttaatccccaacgcaacagtagagaggaggtgcctttagaaggagattagccttagaaaagggccctcggctcccccaccacgtgagtgctcagctgctaggcaccaacctagcagcagaatccaggcccacaccagacactggcacctagtttggacttcccagccttcagagccgtgagaaataaatctgttgttttataaatcacccaacttcaggtattttcttatagcaacacgaatgaactaagacacacagcaaaccagcatgaaacatctaggaaagtaggaacacaagaacacagcacaccacgctagggacgcctgggcccgcaggtggttctcagaactgccattgagaatgcccacagcaaagggcccattaggcaaaggcccaggaggaagaaggcaacagcagatgggggcgtcttgctgaaaaagctgagactctggactgcctcatacaggatatgggtcttactacaggcaataccctcgaatattttctactctattctttctctgtctttaaagccaattttaacctacgaagaaatacaacctcctcttctcccactcttgccccaccaccaaagacaaacacacatatgctagactaaccatcctacatgatacatgcatgtatgactttaaggaaaacacttctaataagatagctggagggaatgatcaggattttataagcaccactagtcctgggaaagctggtactagatccatctactcagacaggaagaatcccattttcgtttgtattttattttagagatggagtctcactatattgcccaggctggtctggaactcctggcctcaagggatcttctcgtcttggggtccccccaaagtgctggggttataggtgtgagccacctcacatggcctcagaatcccatttttaataagctccacagcacatcactacctcattaaaatacctcattaaaatggaagaaaagccaacatacggagaccccatctctacacataatttaaaaattaaccaggcatggtggcactcatcggcggttccagctaccagagaggctgaactgagaggatcacctaagcccaggaggtccaggctgcagtgagtgagctgtgttcacgccaccgcactgcactccagcctaggtgacagagtgagaccctgtcttaaaaaaacagggcagaagaggtcagggggaggatgggtgacagagtaagaccctgtctcaaaataaggggacagaaggggtcaaggggaggaagcctattgccacttcacacaaagtactgctaattttatttctaaaatgtttagagcacattgtagcataaaacataaaaccagaacaagcacaaatgggggtgttcagtaaatggtaatgattgatatatctgaacaaaaatttacaaatggatgtaaagtaacacttcagctagcagaaagtaactcactttctccgttttgtttaagggatcacctccttaaacaaaattaccaaccactgaaatgtaggtaaagtttttattacataaaatgaagttgacaactaaatgcaatgtagccctctggactggatcctggcatagaaagaggacactaactgaaaaactggtgaacagcaaataaattctgaagtttagttaaagtcaacgttggttcattttgacaaatgcatcacagtgatgtaagacattagcaaagaggatgaggtgaggggtacactctctctactatctttgcagtttttaataaatctaaagttattttaaaataaaaagtttatgttaaagaatgaccgcaccagagggctgttcaagaaatgaggaagggatcaaccatatcaagtactactgaggaatccagcaagataagcgtccacctgacttatattaattaaaatgctgaaatcccaggagtgctgggagagaggcgagggcaggggatcacaggaactttgttgcagagttgcagaaggcctcagtgcttccctctgtcccagaggtcctgtgatatcccctcctcttgccctataagcatcacggtcctattgctatgaaccaccttgtgcaacctcagtggtgctttggaatgttctagaatgaatcaaaagatcctcacagctttccctaaacttaggaatgcatcctaaactactgagttcagtatgatattcaataaagtgggagcaggggatagaaaatgccccatgcactgacctcttaaatcctgtgcaagattctatgcatagaggatctctctgcacataccacatagaatgttttctgaagcttgctggaaaatattccctatctctgtcaaagaaagggagaaaggataagtcaggaggagggcagaaccagagttggaaggcaaggacagctgctacggttcaccctcctacacactgacccgccagcgactccgtgcaagttcatggagaagggaagggaagaaaggaaaggtgtcagctgacttgagctggagagagagaaaaacacaaaggcgacagctggtgagagcctcccgtccccaccccaagaggagaaagggaggaaacctgaaaccacttcaagacgaaaaagaggcagtcccattgcagctggctgcctcctccagttccagcagagctggccggctgggagacagccccagcctgctgggagagccccctgggagctgagctgcaggagagggctccgacagccctcctgggttctgagacagcagtgaattcaaggagacaaggatgctctgaaggcaaaaggataaaaaatggatcagtgcatctggtctccctgtcaacaaacatatccttctgatgccacctctttcacgacccaagaatcttttgaatccatggcagtagcacaagacaacttccttgacaatcactgtgcccgttccaacaaaatgcggttttctatcatcagtgagtgataggactgtaacaggtgtgttcagagctgagctgttcttctgactcccgcccccatctccccctcccactcctcctacctgtcagctcccagggcaccctaactttcacaccaagctgttttaaggcttccaaaggcctctctcaccagcctcttctatatcatgtgaacaacaaatcacgttccctcccctcttttcctactgattcagacagaatcttcattctgaacaacaaaaaattgacgtatatcttttgagatctagacttcacagcataaaaaaattgataaagcctactaattataccaagtagggtaaacagtggttaaattttttttaatgtgaagcttgactaaagtctacttacacagaactatcactatatgaacaatatggtagacaggtaatgttggtgtctcaaataactaactcgagttcaacttttaacaaaagtataaatgcaaataatttgtttacataagactttttccccctaaaacaaatattatagctaattggaactggcctatttgtgggtgaacagaccaacaggctaacagactatactcaatactacatctctaaaggcagtaaaatgccaaacctacaaattgcctatggaaaagtcaactgctgtgttttcgtaaaccaaattttttttttttttttttttgtttgagagagagtgagtctcactctgttgcccaggctggagtgtggtggtgcgatcacaaccttctgcagcttcaacttcctgggctcaagtgatcctcccacctcagcctccctagtagctggactacgggcatgcaccaccacatctggctaagtttttttattttttgtagtggtacagtctcactatgttgcccaggctggtcttgaactcctgagcttaagcgatcctcctgcctcagcctccaaaagtgctgggattacaggcatgagccactgtgcccagcctatttttatttataaaaagaaaattctgggtaaagaagaaagggaatatctaattctcatttaggtggggtttttagacaccaatccatgcagaagcgacagcccctgtgcagaggagcgcagccatctacaaatggaccacagaacaaagagaatgccctgctgtcagcacaaaaactcttcccatgctggtcggtgccactgtgatacctgcttctgtggagcagatgatcctgggatcctattgtccctcattgtgtatggattcagtaggcactactgagaaatctcttatagtctaacagaagttaatgaagcacatacaacacagaaaaattaacaaaagttgataaagtacttcaaaaagaccattactggtttttgtaaactcacaggatgattccagattttgcaagcattagaatataaaatacctaaaaatttcttaaaatgtacaatataacaataaggtaaattcataataatcaggttcagcgacaatactcagaagcaatgagacaatcccatcccattgcctggcacaggaactgcctatttagttttcaaggtgtttgtacttcttttgtctcaatctccccagcacaaccttgggaggatgaaaattcacgtgatagctacatgctactgaaacttggttcttccaagtttcctccactcaattaaacctccaaattacttgcctttgataactatttttaatgacaaactacaaacaatcacagagtttacaaggacaggaactgggatgagatcagaggcacttgcctctgacaccaatgtaagggggggaccaaaatctcagtagtcacgataaatatcataatgcaacaattcaacaaaagagattgttcagctagagatcaacagattaatagactgattaatagagattaatccaatccactgccacaacagatctccacgtttgcagtccttggctggatggcctctacacaacacggctcccaggggtggtcccgtctcacagaccctacaggccaagttctttacttttcagtttccgtgttcattaagtgtcctggaagcagaactgcatcataagatcaatggcaattactctgacctaaaaaacagagaatctcatagatgatctaatgaatcacatcccaaccaaccaatccagggttgatctacccacatcctgtactgcgtggaggctttttaataccagtcactactagggagtaaaacgtcaaaaagagattgcattccttaattttgcattgtttgcaattatctgtaaaaactaatttttcaaaagaagaagggagacaatgcaggcagccttctccatattgatcgtgaagaatctacaatcaccaacaaggcacagcaggccacaacatctgaaactgcagaccctatgttcctaccacaggctccttcactgaaagcaggagcttcggagtcacacggtcttgggtgccaagtaccactcagccatttattaatatcgccaagcctcaatgtccttttgtaagaaaggaacgtaatatctaattcattggattataaattcatatgttgaaggcctaatagtatgcactggacttagcaaatattcaattaaatcttatcatcatcatctcataattatttttccattgtatccttccccaaaccagaaaatctctaggttccatgaaaatgtgtccacagaaagaaccaaaggcatggcagagctccatgctaggccacggtactcctctgctgctgtcttcaacaccaggtgactggtttcctaaggaactagacacacaacttgtcaacagcatttgtcttctcatctgcactgctcccaaccaatgacccaacacagctttgtcatcttgggagagaaggtggtggtacaccttcagatcagtttctttgattgacctaagaaacatacaactgaatgtgggacgcatctatcctaataggactccaacataaatcagcacctgtcacacagaagaccacatctcaacctcacacttatctttcagaataaactgaaatctacactaaatttcaggtccgaaaatcccatgccaattaatagagagcacagaatcacaaacacaagtaaccaaactctcccgtatctaaaaatctgctttctcgagccacaaagacatcctaactagccttgatagattgtacatacagcactgccagtgatgggtatctgaacttgaagtcattgttccatttcacatgaagattgaacctgcacatcggctgtctaaaatcaatgccaaggttggaggagggagaggaaaaacagggttggtctgagagcacacggaagctgtgtgactgcccccacaatcacgcctggctgcagcccccagataagggcatggtgggtcctcccctgccacccttctctgccatatatagcagtgctgggcacctggcacagactccctttgcactcatggctgcctggagaattgctcagagtaacagcatgtctcggctagttaaaaagatctccagacactctgagcccgtgaaagaagcaacaaacagccaggcctgagccaatccagatgactactagagcagcaaaaatctcagctgtgccaactagaccagtcaccacgctcctcaccgcccatctccctctggccaaatggctctccatggtgtcccttagaaataacaataaatagcgcaacaacttaattttatagttaaaatgcaacaagccagacagtacattagccattatccatgcaaatcttgaaatattttccatgcaaaatcccagttttaatacatagtcaccatgaagaggaattcaacagcaaggatattacatttaccatctcaaaaataaaaaaactttttctaagttaatccaatatttggtcgtttatgatttaccttccaagatgaaaaagctgaaaggcttcttttgtccccaaggggagagactgccagcagctttgaggtctgccttccagctgtttttgttagatttttacacctgctaatgcccagcaactaagtgagcataaacaggcatcgcttaccagcgtttcactggaatctcttgatttaacttccaaattacttggctttgataactatttttaatgacaaactacaaggaatcatagcgtttacaagggctggaacagaggtgagactacaggcacttgcctctgacacaaaatttaagggaggaccaaaatctcagtagtcaagagaaatagtttaatgtaataattgaacaaaaaaactgatgcacaaaaatccaagataagcaaaatgccaaaattttaaataaaaacagactcatctgagtgtcctgtctgataagaggggagattagaaaccttctctccagatggtcatcacaatcacaggggaccaaagagctgcagtggactgaaggaagtgggtgcacacccaggagctcgggcaactaggaccctctgcatcctcgaccaccccttggaccctgtggtctcccaggaacccagtctctggcctgaccccagaaaaatcaacagcaataacctagcaaccaacctcatcgttttacaaataagaaaaacaaggctggttgtagtggctcacacctgtaatgtcagtgctttgggaggccaaggcaggaggatcacttgaggccaggagtttgcgaccagcttgggcaacaaagcaagatctcgtttctacaaaaaatgttaaaaatcaaccaggcttggtagcatgagcctgtagtcccagatattcggaggctgaggtaggagaatctctagagcccaagagttggaggatgcagtgtactatgatcatgccaccacactccagcttggatgacagagaaagaccctatatctacaaaagatagaaaagaaaggaagtaaaaggaaggaaaggaaggaaagagagggaggaagggagggagggaaagagagagggaaagagagagaaagagagagggaaagagagagagagaagaaagggaagaaagaaatgaatacacacgctctggggtgtcgactgttggaggaaaggctaggataagaatctaagcctcccactccagggctttgggcatgcaatcctcagatgaaccatcaccaaaggaagactcggcaatgtggacaggccttctattgcttaaaaaattgtagctgggcacagtggctcatgcctgtaatcccagcactttgggattacaagtgatttcaggagttcaatgctgcagtgagccctgagccatgatcacgccactatagtccatactatgtaaaggaaatggcacagtaattcttagaaaataattaagaaacggccaggcgcggtggctcacgcctgtaatcccagcactttgggaggtcaaggcacgcagatcacgaggtcaggagatcgagaccatcctggctaacacggtgaaaccccgcctctactaaaaaaatacaaaaaattagccgggcatggtggcgagcgcctgtagtcccagctactcgggaggctgaggcaggagaatggcgtgaatccaggaggcggagcctgcagtgagcctagatcgcaccgctgcactccagcctgggcgacagagcaagactccatctcaaaaaacaaaaaagaaaaaaaaattaagaaacaaagaagccactaaacaataactctactatcaaaaataatttcttggctgggcacggtgactcatacctgtaatctcagcaggaggatcacttgaggccaggagttcaggaacagcctggccaacaaagtgagattctgtctctacaaaattaaaaaaaaaaaaaattagctgggcatggcagcacacacctacagtcaccactactcggcaggctgaggcgggaggattgcctaagcccaggagttcaaggttatagtgaggtatgatcacccagctgcactcaacctgggcaacagagtaagacctcgtctctaaatataataataatttcttaatactattttaaaatagtaacacatttattaaagccatgaaagtcaaatgtctcaaatttaagattctatgtacttttgcaaatatgcccataagtagcccaaacttgtagccagcttcatatcaagtagaaataatcacaagcatctgtaatgaaaattgtcaacttcactgatttcactactttttaaatgataaaaaattatgaaagacgctcaaaaaagcagctatgtacatacccaatttcctttctgtgttaagtttctaggtttccaggaatctcctctgacaaacaggaatttatttgcttctactaataaatcaattggaaataacataaaacataaataagtttctgtgacatttttactaaaagggagccgtgtctccctctagacagctggagaacaatctttcagccatgcccaggcgagacaccctgacttctgcagtggacacccaggctgccggggttcagggtcaccacatttctgctcctcgacccttccctgcggggattagaaggcagagaaagcagcattggttcctgctctcatatgtggttttgtggaaaccctgcttatcatggaaaccaagtatcttcaattaaagatatttgcttctgcttctgctgagatactggcttctgctaagattataaagaacagaaatttgtacattggaaatcaatgtaaaaatctaatgtacattttctgactggtttgcttttttggctttttttcttttccctttagctttaggaattaggaatatcatttgagccacgattctaagggagctggggcggcaggggctgcagacagccactctagagagagacagcatctttggagaagactaaggtggcaattcgttttccatgtggaaattcttcttgaggatctaagcaccagcccaaaccacacaaggttatgtatttcaataaagaggccatttctaaatgttcaaaacatattattctcctactttaaaaaaagaaaagcaaaaatggatcgctaaatgcaaagccaaatcctcatagtggtaacttttactgacatcttatctcaactaaaaatgaaaagttttcattttcaactactctttgccaataccctcttcacttagcttcaaggggcttccacgacacccagcctggctccctccatctgagtctctgagagctggtgtcgtggtatgcccaccatgccaggttccctcacaagagttcatctaatcaaagcttccatgactaacaacgatttaaaagccacttgtgaaagatgttgaaacatgttcacatacaatgaataaagtttgaaaatggcttttataggatggttctggggcagacactgcaactggctgactcagcatccactcctaaggctctctctccctgcctttctttgcctacagcggctggaaaagtaaaaatcttgtactcactggtccaggctccccttgtagctgggcatggtcacacgacagtttcctaaccaaggagacctaaacccaggcagccatggagcagagagggagcacaggaatggacgtgggggttaccaccatgacaagccactttgctgtccggaacatcatggaaaaagcagaaaatgcgggaggaggtgtctaggtcagccagccatcaagggctgcaatccacatctcagccaccggaacccctccatgctgcatcacttagaaagctctgctcttggccaggcgtggtggctcacgcctgtaatcccagcactttgggagggtgaggcaggcagatcacttgaggtcaggagttcaaaaccagcctgtccaacacggcaaaaccctgtctctactaaaaataccaaaattagctgggtgtggtggcgtgcgcctgtaatcccagctactcgggaggctgaggcacaagaatcgattgagcccgggaggcggaggttgcaggttgcagtgagccaagatcaggccactgcactccagcctgggcaacagagcaagactctgtctcaaaaaaagaaaaagaaaaagaaaggaaaggaagctctgttctcagtcacctccacatcctcccctcccacccctcgctcctctgtaagcactccacacctcagacagaacagacttgccctgaagtctggaatcaaaccccctgtagcaaactcttcaagtagcagcatccccccctgctcccactctctctaccagcaaaagcctggctcacctcctccgtaacactggccaagaaccacaaggaacagtgaagtggcttcattcatgaagacagacttgagcacccgctccctgctgcagtgcaggcactgcagcagtagaggtgggtgatggtgccttctaataaaatcctatgacgctgtaactcaggacacattataacattcgggctaccactgcactaatcactaaggatgttcccctcagttgtactcatcaacacccagagtgcccctgggccacaggcccttcacagtggatgttatcttccttatctttgtagcacctgtcagacctgatgcacaactggctgttaaatactaacggcatgaagcgtaacccatcaacttcaatttcctcccactagatttgtccattatgtactttccaaattctagtcctattctcttacttcaccccatatacttttgcttttattttccctttatctgtttccaaaattgtaaatatagcagtcacatgttcttatggtagaccatgatgtcctgacaccaaaaatcattatgatgaagtcttgcatgtagttagatgcttcctaacaccatgattatttcccattattctggaaatgctagccagtgcaattaaacagagaagtaaatgtttgctacaaatacagaaagggggcaatgttattatttgcacacaataaaactgcatactcggaaaacccaagaaaataacttgaattaatatacaactaagaggattattagttttgaaggttataaaaatgaaggttataaaaaatatataataaaataataaactatatataaattataaccagtttaaaaaacataataagaaaaaactgaaaatagcaatgttaagtttaaatccctaggaaatacttagcaaacatatagaacttatatgatgtatacagaactttaaaaagtgacaaaaaagaagataagtgaaagagcatttaatatgtattgccggatatatggacttcttggatagtcagaagtaactacttgaaagatgtcagttccctcctaaaataatatataaggccaggcacagtggggctcacacctgtaatcccagcactttgagaggcaggagggcagatcacttgagttcaggagtttgagaccagcctgcgcaacatggtgaaaccccatctctactaaaaatacaaaaagttagctaggtgtggtggtgtgcgcctgtggtcccagctactcaggaggctgaggtgggaggatcccttgagcccaataggcgaaggctgcaatgagccaagatggcaccactgcactccagcctaggcgacagaacgagaccccctctcaaaaaaagtacacacacacacacacacacacacacacacacacacacacaaaacccgcagtctcaatttaaaaattaacagaatttgtgttgttttcatgggatgggtccactttggcaaaatgagtcaaagtcataagcttggaaaataaaagcagaaaattcgcaaaaattatgaaaacaaaaaacgatatggaagtacctttttagaattaaaaccagtttgggattgaaaacagaagaagagaaaaaaacaaataaaacagtatatctaattcagaaaaggtcaaacatatattaatctatggaaaataggacatttcaagcaaaagcagaaaagagtgattatttttaaaataaaatgatcaagaaattccatttctagaaagctacagacacatttgtagtaccattacagttacatcctctttctctctttcaaacacacacacacacacacacacacacacacacacacacacacacacaccctaagactatagaggacaggaaagcaacacagaaggcacaatttacatgtttacatttacaggagaggagtgaggagttaggggcagggagccttatttcttctctgaactaattaagttttataaatgttaatgcatttttaatgttaatttggattattcttggtaatgacataacaatttttttttttttttgagatggagtctcactctgttgctcaggctggagtgcagtggcacgatcttggctcattgcaacctccgccccccgggttcaagtgattctcctgcctcggcctcctgagttgctgggattacaggcacacaccaccacactcagctagtttttgtatttttagtagagacggggttttgccatgttggccaggctggtctggaactcctgacctcaagtgatcttcccgcctcaccctcccaaagtgctgtgattacaggcgtgagccaccgcgcccagatgacctaagaatatgttttatttacactctcttacactgtatattaggagtgggaggcatagagatcagttcaggttttgccaacagacagaaccaggttcacacccgtcacttccacacactgttgatgtgtctcagggaagctgcttatctcccattaagtccatccattcagctgcaaaatggggataataccctcaactgagctgttacaagtattaaatgtaataaaaaaaaaaatagcctcgtatttggtacataattacctaataaatggaattggttgctgtgctgatgatttgggtcaaaataacaattatcttgatactccatgcttataagacagagaggtgcagtggccaaagcaactccatctcagatattaatctgccatgctgacttctgattaaccccagttctgggaaggcctctaagatttcccgtttatctattgcaggagctggcactgcccagaggtcaaacaaccttgacattatagtactttaattgtcctacacatcccttcagagtcaccctttccccacagtgtatcagccctgggtctgggggtagtgcagagacacagacgtggcttctgttcctaagtcccaattaaacctttctctctttttttgagatggggtcttgctctatgacccaggctagagtgttgtggggccatcatacctcactgcagcctcgacttcccaggctcaagcaatccccccacttcagcccctcaagtagctgggaccacatgtgtatgtcaccatgcctgtctagcttttttttttttttttaatagagatgaggtcttgctatgttgcccaagctggtctcaaactcctggcctcaagtgatcctccagccttggcctcccaaagtgctgggattaccaacctgggccacctcaccttaacctaaatgtttctttatgagaaactggaattgtgagcctctttctttagcctctcagcttcctcggactttgcgagtaggtttgtataggcctgcccaccagagaacgggaagtaaagttggttgtacatctaagacatagttttcctaatttgttaacctaatgcttttctcagtacatgataatttagtcatattttcttacagaataacaatgtatttttgtgggggggttttctgtgggatgagaaaaacccagcttctaaggttgctgcaaaactgtcacatactggtgggtcaagcttaccagggaacaactcatcttctaatcacattaaaataagtatgtgcattctttttgcctttagcttaaaaaaaaaaaaagtaagataaaaattaaaaagaaatatgtgataaaggctatctctgtcccatccccagttcaaaccttaatgagacaacttgaaaataacttattcaagtcagcatgtcgtgcagacatcactaccaatttggcattatgcactgactactgcactactaacacagtcagccttttatattatttataagcttttaagacatgtaaatgctcctgaagccacagcaaaagctaacagtcttgtggggagaaaaaaaaaaaaacagaagcaaagtcaagagctgactactatgaagaccagccatggcactgtgaagtgtttttgtgtgatcaagtgtaatcattacatcaaatacttgctgcctctcaattcaatagaatatctttgcaaaatattcaagcaaaatgcacttgcaaagtgcatgttgcatgctatgacttatatcagaaggcggacgctattaccagccacacaacttaaagtggaaaaatgggaatttagtaattaacagaagacagtcctttgatttggggttattatctccttatgcagagacaggggctgtgtgcgaatacctcagctaaaggctagtgtttcaagaaagcctatccttaccctaccaaaacaattacagagattggtctcaaagtctgagtggaaattctctttttctaaaactacctgtttttccaaatgctccattcatgagatgttttctaatggaagaaaacagccaaggcagcaggctaaagcctcctccttaatgcacttcagtcatctcagcctgttgtttcagttccaaggacagggcctcaggattggtctgaaaagcacctcgattctccagctccagcaggggtcctgattgctgtgtgtacaaacgaagtctctcttcttcatacatgcccacatgaggagccaaaggggatgacactctatccccaagggcacttggactgacaaatggaaaagcaaactaagagctggggacacccttggagaagctggcaaataagctccaggcaaaccttgaagaacaggcagacgactggtgcaagccctgagccctgtgtgccacatctgactgctggaagacaccaattcatttcgtccttactatcctcctacaaaagactagaccaccacaaatgaagccttggaatacagccatttaacatggcaaaggcccacacaaatatttctaaagaccttgccacatggacaacacagaaagtagctcatgttctggtgaataacgcaattttgtattttgctgatgcctgtgaaaccacccagtgggataaaaataaatatttagcctacttattgataaaaatatcctcccagtagcccatccctggagggcatggcagagggttgtgtgaattctggacatgcatatgtttgattaataaaatccaagaggacataggtttcaaatcttcttgtatctctagaccagcaaatccagccatggagagaagcagagaatcacagacaggaagagtatgccaagcaaaagccggggctgcacaagccatctcaaagtatgcagggagtcagggaaaggacaagggagaacacacaaccttaaaacaaaaaggagcacacagttctcatctaggatacttttaaagtggcttcccctgaataagtgttttttatgataacgtagaaaaaacaaaaatagtcatcgtagatcagacaacatatggaattctggttttatttatttttttttttttagagacatcgtctccttgttgcccaggctggaggtgcactgatgcagtcatagctcactgcagcctcctgggtcaggtgatcctctcatctcagcctcctgaatagctgggactataaacacatgccaccatatgtggctaattttacttttcgtagagatgggatcttgctatgttatccaggctggatttgaactcctggcctcaagcaatcctcttgcctcagcctcccaaagtgctgggattacaggcatgaaccaccatgcctggcctggaattttttatactgctagattaatttattgagaaacatacaagcatctatttaccttaccaataaaaacactttcaagtcataagtagctctttctacaacccgtcttatgaaacatcacgtgctttgtcctgtactttcccaaataagcaagttctttaaaagcaaggatcatattttacatttacctatcgtgtacacacccacatggctacacagaaaatactcaaatactttattaatagaaagtcttttgttgcaacaaatctctccttttcatatcatagatacaattgttaaaagccactaatttttaaatcaggcagattttctttcttttactaacatgtaaaaattccaggcttctctgaacaaattggacagggtgaaatgaaactatgccaacctccaaaaactatttcagactgcgttggattacagacaatcccctgacttaaactatacacatacaaatacctcatcagaaataattctaagaataaccttcctcctgttaataaacgacatttatgagtaactaataacagaaagagacacttcagctaaagccatgatgtcaacagtgatgagaacatgaggtggggcttataagcagggacctacatccttgaccacaaggacacaagactacgtgtaagaagtccttaaagcttatgagcaaatggaaagttttggtcaatgtgagattgtcacttttccaaggtccttaaaacaggcagagtgagccaaaaatcgacattttcaatgaggcaaaggatgactgacagcttcaagaagaattgctgggccgaggctgggcgcggtggctcatgcctgtgatcccagcattttgggaggctgaggcgggcagatcacttgaggtcaggagctcgagaccagtctggccaacatggtgaaaccccgtctctactaaaaattaaaaaaaaaaaaaaaattagccgggcgtggtggcatgcacccgtaatcccagctactgaggaggctgaggcaggaaaatcgcttgagccagggaagcagaggttgcagtgagctgagattgcactgctacactccagcctgggtgacaggagagaaactctgtctcaaaaaaaataacagaaaaagaattgctgggccgatcacaagagcccagtgcaagggtatgccctcccacagcaaatcttcctttcatgaggctcaactagcaacttgagaggtcataacttggtgtctgtctatgctcagtgctactaggatctggatctgcttgtagttagcagataacctaaactgccctctgatgttggcatctgatcagcttctcagcagttttctcatcaaatgatttccaagaacagtctctcctcaagaatatggatactcaaagatttggcattaaactgggaattgagatgaggaatgggaaaaagaaaacattccatcctaagcatatataacatgcttttttttgccatttttccccttctgtctcaatcaaccaattacaaaactaaaatgataatgacaaatcaacaagacaggcattaatgttaaggcccaagacaggctgtgcttacctgcttcaaaggccaccatatctgagaattgtacctactggccccacttgctctagttctggggactaacagcttcccaacaaccatgaagatgcccatggtcctttactctagtctcacacaggagcaccaaacttacaataagttgttaaaccaaaccagcagagagaggggctaggatgctaatctgggttgaaatcactgtacaggttggcagtacccctcaccctccctcctccaatctccccatggcaaaaaaatgcacctttttttttttttttttttttgagacggagtcttactctgctgcccagactggagtgcagtggcacgatctcagctcactgcaagctccacctcctgggttcacgccattctcctgcctcagcctcctgagtagctgggactacaggcacccgccaccacacctggctaattttttgtgtttttagtagagacggggtttcagcgtgttagccaggatggtcttgatctcctgacctcatgatctgcccgcctcggcctcccaaagtgctgggattacaggcttgagccaccgcgcccagccaatgcaccttttttttttttcttataaaaaaaaaaaaaaaaaaaaagagtcagctctgttgcctaggctgtggcgtagtggtagtcctgaacgcctgagctcaagtgatcttcctgcctcagcctcaagtagctgggactacaggcatgcaccaccacacttgactagtttttttactttttatagagatggggtctcactacattgcccaaactggcctcaaactgctagcatcaagcaatcctcccgcctcagcctccttaagtctgggattacaggtgtgagccactacacataatcaaagccattcatcattttaaagacaatctctgtcctttgaaccaataaaataatcacagtgcaaagctccgagttcctggtgaacaggctgaaaagacaaaagggaacactgctaacagatttttcaaccactgctttcttctccgaaaattttcttcttttacttttctgcatgaatcttagtttcaaattttagactcaaatcaccaaaaggtactgtcatccccctaaaaaaaggttctaaagtcataaacaagataaataacataatgtcttgaatatctgtgaggaaaaatttctccttgattcctctggtaggtgcaatgttttttatccaaatctgttttcgaagtctatgacagcattttgcatctttttctttacttagagccttcatttatattagaacttcctcacatctaaaatacatatttccacaatatctgcacaggaggttcaaacacagtgatcatgactgaaaattatagttaattactagtcagcactaaaaataaaaaatttaagttcttattctcatctaacacagtatctggttaacagaaagttgcaaataactgtgaggtgtgacatgctacagcctgtccttcatctacctgtctttccttttccacttcctgactcttaaattgtctttaagaaaacatgtcctggccgggtgcggtggctcatgcctgtaatcccaacattttgggaggccaaggcaggcagatcacttgaggccaggagttcgagagcaacctggccaaccaacatggcaaaaccacatctctactaaaaatacaaaaaaattagccaggcacggtggctcacgcctataaacccagctactcgggaggctgaggtgggagaatcgcttgaacaagggaggcagaggttgcaatgagccaagatcgtgccactgggcgaaacctgtctccaagaaaaaaaaaaagaaaagaaaagaaaaaagaagaaaatacatcctgaaaaccattgcaaattctactcatgccaactaggaccatgcccaggattctggtccccagttaacctcatcagtgacacatttttctgccgctggtcataaaattcagagtaaacgatgccccattttgtccttgcactggaagggttctgctgatgatgcttcagtatactattagaaaattctcctctcttctagataaacctgcatctgtagacataaaatgtttgggcatataatttaatttcctaaaccagcttccttattggcagactttgatactcctaaaaatgcatctgttcctgacccctttgcaagcactcaaagtattcattctgtaatccaatattggcctaaactatgaaatgctagaaaatgctataattatctacatgggccactttaagaaaacctcatgcaatcagggcttagtactaacatgagaaaagctaggataaacattagctgagtaaagaaaaagttttaaaatcacatcaacttttttggagtatccaacaatttccacatgccactgctatatgttattttacacattctttttaacaaatcccttcaagaaaggtagtatgctccccattttacagataaggaaacccaggttcagggagaggtaagcaatttttccaaataacacagctagaaagtggcagagcattattccaaagtctttccactccaccacactatgcctcataaccatctgcagaagagcagctttggaatgaaggatattaggagaggcaagtgaattgtcactgggaagtcactgtgttgcccacaatttccttcttcctcttatcacgtcacactgtctacagaaggacacctcatgatgagtcattttctagttggggcactcaagcactaaggcccttcaacttacagacagtgtaatatggaaatgtgttttaatcctggaagcactgagtttggattaatttcactttactcattcacagaagaaaaaaattcctgagaacagctcctacctaaaatgcaagaactagaaaagtccaagcccaccctgtgaaagggcacacctggaagctccttaagttggtgacggatgacaaggaaggtttaacagcacaggaaattcccccatggtataaattatactaggtgtgactgaaacggctaaattaggtcatgatagatggttgtgtcagacagaacaggttatgcaaacaaagactatgacatggaggatgatttttgctgcacaaaaagaatagaaagaggcggaaggaaaaagctacagaatcataggcactgaagataaatgaaaactaaaataaatgaagacaaaattaaatggcttccagtaatcaaaattcaatactgaaacttttttaaaaagaaaaaaagaaaaaaaaactcaatactgagaatagatacaactcaatgagaattggatatgaagcacttttttttttctaataggaaccaaagaaatatactacggcatagaaaactggctcagaacagggtatgcaacggattttattcacacgtgtaaatctttaaacttaggtcctaaatggtcctatcacattagaagaaaaacaatgtacataatatttaatcaatgagtaagcacttactagatacactgtgctcttgagaactgtttcacaagtggccttgctaaagtagaatatcacattttagctagaaccacccaagtatttctaaaagtgactggtatctattccacgcatcaacaaaagggaaaaagaaacttctagaactttccacctcaaacatttcactgaaggatgatgcacatagcaatcaaacattccgattttaagcaagtaaaagagagcaaagaaaaagtattcatataaaacaggaagtgagagggacaatttgaggcagccaattcaacagcacatcgcctaaggccaaggcagaattattttcagcaggcaacatgctacgcacaaggatttcagccagcataacgtgtgtgctgcggtaaaaatactactgaagaggattcttgaataaaggcacccaccatggcatttcacaagtcactttattccacatgtggaataagagacaaactgccttatggcttaatttttaatatcatgtgaaaagctctgcacatactgctgcgctttctgatttttgtctactttattagctgagaacacttatgaatctaaaaatacttcgttttggggagtggaattcctttattcgtatttgcacatgactttacctgtcaaaatctttcacaatgccactaggtatataggtttcaacaagtttagtataattccaatcttagccaactatattatgtaagtaatctcaatgtgggaggcagcctctaaaatgatctccctatcttctggtttttatgtctctgtgtaaacccctccccaatctacctttttttggcaggcggggtgtgggggacagcgcagcggtgtagaaacagtatttattatgttgcccaggccggtctccagctcctggactcaagtgatcctcccaccttggcctccaaaagtgctgcgattacagacatgagccattatgcctggtcccaatctactactttttttgtttgttttgagacagggtctcactgtgccacccaggctggagtgcagtggtaggatctctgctcactgtaacctccacctcctgggttcaagtgattcttgtgcctcagcttcccaagtacctgggattacaggcacctgccaccatgcccggctaatttttgtatctttaatagagaagatcgtttcaccttgttggccaggctttctagaactcctgacctcaagtgatctgcccgcctcagcctcccaaagcgctgggattacaggcatgtgcactgtgcccagccccattctacttctaatataatagcagaagtgacaggatgttgcttccaaattagtttataaagagcatgtgccttctgttttaggcactcactggctctctctcagattaggagctgcatgtggtgaggagttgacacctcctgtcaacaaccacctgaataagcttggaagcagaatgcccagccctgctccagccttcagatgactgcaacctgagacagacagccgtggagatccaactaacacacacctcaagtcctggcccacagaaactatgagtcagtaaatgtctgttttttaaaccactaagttttgggataatgtgttatactgcaataaataaattaaattaaattggataattaatatatttctttatatatgatcctgtcacagaacatataacattatttggacataaaattcaaccaaaaacaaaaaaaaagtggggtgaaacacaaatatattcaagtacctagccttaaaaaaacaaaaggggtcaggcacagtggctcatgcctattatctcagcactctgggaggctgaggcaggcaaatcacttgaagtcaggagtttgagaccagcctggccaacatggtgaacttccatctctactaaaaatacaaaaattagccaggtgtggttgcgtgtacccatagtcccagctactcgggaggctgaggcaggagaatcacttgaacccaggaggctgaggttgcagtgaaccacaatcacaccactgcactccagcctgggtaacacagcgagactctgtcaaaaaataaaaggaatccccatttggattatctttcaaacataaaaaaaattatacacatattctggtatctaggctagtttaaaacaaaacaaatcagattgattatttttcagtcctaaaaagtaattagtgaaacattttagaaatatagccaagttataaaattcctgggagatttccagtggcaaataatggcctatttcttctactaactcacataaaatgattcagcattcctcccttgatgattaaaatgagcagattaccctggagaatcaatgttaagcaaagacaaatgcctgccttccattatctttttgtagtattttatgttctgcagtgcactatacttctacaaagaaagggctatggtgttctacttaagaaaacgatgagtcctaaaggaacaaagtacagccaccaaaaaaattatgtatatcatgataaacgaaccagggaggatgatgtgtcaaggatgggattagaaaaagtgcttacacacatataaacataacatagatataaatacaaatacatatatataaaatataaatacaggtatacgtgatttgaacacagccacaaaagagcattcaattttatttcacgaagctattttgaagccctagtttacacccatacttttattgacattgaaataagttggtctttaaaaaagaaaatcacataaatagaaactctaatgctgtttccaaacctgaaagtcacccaggtcactcctacaataggttcaggttctaaaacaaaaccctaaaacatttatcaacccactttactaaacagtttacttttttgtgtgtgagaaagagagaggcagggagggagagggagagagagagagacaaagagacagagagacagagagagagagagagagagagagatggggtctcactctgtcgcccaggctggagtacagtaacacgatcacaactcactgcagactcaacctcccaggctcaggtgatcctcccacctcagccttcctcccatcccagccttcagctgggaacacagacacatgccaccatgcctgacttttttttttttttttttttgtagagatggggtcccactaggttgcccaggctggtcttgaactcccggactcaagcaatcctccagcctcagcctcccaaagtgctaggattaaaggtgtgaaccactgcacccagccaaaagtttactttttaaaaggctctatctatatgatgttaaatacttgacaaaaactcttacgttccacaaaatagtcttgatgtattggagactgggagtcggggaaaatgactgttgctgatgaagaaacactagccatttgtgctgggctggcaggactctgcactcacagtgaagatgagccatagacatgacttctagggttcccacattcagctaccagcaaacctaccagctaccactagaagcactacatttactttgcaaatataatacacacctggtatgttttaagaataagaaacattgtacatcagaccatcaacattatcacatgattcaaatcaacactccatacactgagaattttcatgccagtgggggcactgagggacagattctatcagaaggcgtatttgttcaccatcttagtagttcttaaaggggcagaaccactgcccagaggacattttggaaattttgttgtcacaatgactggaggtcactgctggtatttagtggcggaggtcaaggacctctaaacattctgcaatgtgtgggacagtcccacaaaaggaagaaattgtcttcaatatctaaaggtcccaccagacactcgggtcagaaatttgtctataattttctgagccttgagctcataaacacaaagtatttttgcccagtgttgacagtgcatgggcaatgcattcctgaaatagtaactttctaaggaaaggtcactatttttgaagagctgagggctgcagcaaggttgtctgtgatattaagtggcaatgccacccacctgcatcagcttgccaacctgtgtcctctgggggaaggtgggagaaagacacagggtcattccctgtatcattgcaacttcctgcaaatctgtaattatttcaaaattaaaagaaaaaatagagatgttgagtcatatggggctgagaaccatcaccatgaacttatcagctttaaggtaaggataaatgtcaccactccaccccaccaaggccaaagcaatcttcatctcatttacagcccatttctaacccatcacctacaaactagacacctgcagctgtgtctagcccacggccacctgggtactcaggagagacggcatgtgggtactggaacccacatctcctggcttcctattcaatgcttttgccacaacacagattatgtgattttctgccaccatgtatactgggtagaaatattcccaaatactataataatttttaggcagcactttcttttcagaattgaaataaattcaaatgacttaatctcctcccagccatatactaataagatccaaatatgtcagtgaagtcactggattttcacttagtttaccaataaataggcactggttcccaagcttttatactcaatggcataaaaagaaaacggaatttgtacaacaccgtgggactgctcatacctggcttcctcaaggactaaggtgcatcaccgtcctgcatgctagttgggaagatgacccaggcactggtcatatattattgcagctttatgattctcaagaaacccaatagaaatttcttaatcaacaagagtttgtctgcaagaccttaaggaaaatgggcaacctaggatttctttgaaacttctgaaggaaggcattctaaatgcagggtgctcattaaatataagatctcctaattatacactcacctgacatgttatggcccgcctacgtactttagccaatgaatgcaatctccttgaataaaaaatggtggttggaaaatacagtttaaaatagaattccttaagagtccttcctcatctttgagtgatacatgtagaagaatctataggaaaaatgatatattttgggggatttgctttgaactaatccagcaggtactggaggaagtggggaagggagttacagataaacaagaccggccatgtgtctgtgccggcagctgctggagctgagtggtgggtgcctgagtgctcattattctactctctgtttactttgaaaatttccataatgaaacattactaaaaaaaaaaatagcttggtgtgtgttaagggtagtgtgctaagaggtaaatggtgggaactgttgactggaaagaaaatgaaggcaaaactgagcccaggagtgggagcagggtttccctcacaagttggctctgaaccaccttttctgagacagctcttatagataagcacctggctgtcttgtgtttctcattagcccagcacacagtgctcaaagtactgttaagatgaaaacatttatcttcataaacagcctgcactgtccataatctatgtacttcaccttcctataagatgaaaagtttacgaagttaggattaggtctcatccttctcagtgccacccacagcaggaaagacagctatttgccaactattagactttagcatcctcccttccttttggtatacgagagccaaaagtaaacatagtattgagagaaagacacacctgccccttcccccaaaaagatacagttcaaattcaacgcactgattttctggtacctttatccaatacttccgtccaaagaaaaatacaaagtttaagggtgaaagctcaaatctaagcaagatgtccaaaaacccatacttccgatttatagcattccatccatactatttgtgtcccaggtaacagctagtgcaacccccagctcaggagaaagaaagccacattacataaaccaggcatggttttgagtagagcatttcttcttaagatttgggcttcttcggccaggtgcagtggctcacacctgtaatcccagcactttgggaggctgaggcgggtagatcacctgaggtcaggaatttgagaccaccctggcccacatggtgaaaccccgtctctactaaaaatacaaaaattagccaggcatagtggtgcatacctgtcatcccagctactcgggaggctgacacaggagaatcacttgaacctaggaggcagaaattgcagtaagctgagatcacaccactgcactccagcctgggcaacagagtaagactcaaaaaaaaaaaaagatttgggcttcatccagcctttgtactaaaaacaggagcagtgatatcgttaagcgcttatttctcagaggagaaggaagaagagaccttaatggtagtattaaagtggctaacatctctgcagggattgtgagccacggaacattctcaacaattttcatttattaactcatgtgatcctcattcaatcctaaaagtaagtactattattacacacacaccccattccacagatgaggaaactgaggtactgcaatgttaggtaatttgcctaaagattacacagagctgaatttcaaatccagacagcctacctacagtctgtgctctgaaccaccccaatagggaatctgaagaatcaaactatcttttattgaaattactccttttagtgttatgaatcaacagtccaagttaacagtgcatttattaatgattcactggttaccaagtcaatcaacacgttgtacttgcatcagaataaagcatcatggattaaccaatactaaattatgttttattacttgtattttatcagacttcttagtaaggatctgtgtaatcctgtatgggggacgtggggggatcacccaaagctgacactagcaggtcagaagtgggtatttgccaagggaaacacttcaaggtacaagagcagatttaaaatactctgattcaacacagacatctgctctgccagaagctaccatctgcttcatatcccagacagcaaaacatttcaataaggaagtgtcaaatctgactcctaatcaggaaacaattatctacatttgctactagccccaaagctgattcgaaactcctgaggcaaaagttaatggaaaaatcacagtacagatacacattctaatgagactagacatcagccaagattcctaccagctctaatatttttaaaatacttaattgacaaaaaaaaaaaaaaaaaaaagacccagaagatctaagatgagagatgttgagaaaattttcagaggaggaaaaaaagcaggggtatagaaacaaaggcctttgaggaaaaaattcaagggactccctgactcaaaaggacctaccgtcagacaactatgcacacaattacaacgcaggaacgtggtgtaaggcatctttaagataaccacagtgactttcggaggctcaaacaggcaagcactagagcctgttaggatgttaggaaaggttttgtggaagaaaccagcaactgagttaggtcctaaagaatccgcatgtcctcagacctagactcagcgagaaaggaggcatcccagggagaagaggtcccacaagcagcacatccctaaacaggagctgcagcgcccaggactcctgcagtgtcattcataaagatggcctgagacagtggcttggggcaaactggagacagaggctacagaaaccctctggagttcaagcaatgaacatatattcagcacccactatgggcccaaggctggggattcagcatgaactagaaaaacaaagtgcttgttttaacagagctgggagtctaggcaatgagacaaagtcaaacatgtaagataatttcagttagtaagaaacacgctgaagaaaataaaacaagatcacgagatagagagggacaggtggagtgccacctgatggcacagcagctgggaagcgtcgctacctgagaactcgccatgttcctctgaaacgtgtgctcagggtaggggagaaaggaacacagctcaggaggtgcacatcctattaactggccctcacagagtgcccagaacactcagcagcctgacggactccgtgactttttaattcaacctcattaattgagctaatgagaggttacttccaaaaagactttggtatgctggtgggactatacaattacagcctttcttctgtttgtttctttgtctgtttgtttgttttttgagatggagtcttgctctgtcacccagactggagagcagtggcataatctgggctcactgcagcctccgcctcctgggttcatgcgattctcctgcctcagcctcctgagtagctgggattacaggcacgcgccaccaccctgggctaatatttttgtatttttagtacagacggtaaaatacaaaaatattgtctggacatggtggcgcacccttgtaatcccagctacttgggaggctgtggtggcagtgggccaagattgtgacactgcaccccagcctgggtaacagtgagactctgtctcaaaaaaaaaagagatttttaaagggatgaaaatataaatgttaagcaatgagattctaatctttctataagaagcatgagtttgttttcaaaaacatatgtgcaattttttcttctttgaaactatttttcaacatctccttacgttgtcagtcctcacttaactagacttcagtgctctaaggatattctactgtccaagttctccatacatgagcctgtgaactccaaaaatctgagacagatctcggtcaatttaggaagtttattttgtcaaagttaaggatgcacacctgtgacacagcctcgggaggtcctgatgacaagtgcccaaggtggtcagagcacaacttggttttatacattttagggagacatgagacatcaatcaatatatgtaagatgaacattggttccatctggaaaggcgggataactcgaagcaaaggcgggacaactcgaagcaaaggcgggacaactcgaagcaaaggcgggacaactggaagttgggaaggggcttccaggtcacaggtagataaaagataagagacaaatggttgcattcttttgagtttctgattagcttctccaaaggaggcaatcagatacacatttatctctgtgagcagaggggtgactttgaatagaatgggcggcaggtttgccctgagcagttcccagcttgccttttccctgcttagtgattttggggcccccaagatttattttcctttcacaagccctattactcaacactctgagggtgtcacagcagagtgaaaaagagaagggaaaacttacttggctctggcccacttttcttctctgcactctggatggtggagccaggcaaatggcttggtccttggctgccagccctggctgaagccctgcacacatgccactccctgctgagcgcactcagggtgcggctccaccccaggcatggtgacagagctctgaagggaggtgaatatccagttcccagcgccgaactccagttcacgtcaccctcggtgcccaaactttaccgctcagcccacctaagatacactgctcattacccgccctctcaaggctcggatcaataaactcccttgacttctgcctcctgccaaaactgaatgaattccattaccccaccgtctctcaatctcaagctggtgtcactgtcagcaaaccttcaccctccacataaacaaggtggccccttctgccccaagtcatgctttgcagctgtctgcacagggctgatggcacagccaacccccagggcttctaggatgctggcagacctccacggatactgagcaccaccggtacggcgaccaccagggctaggtctgcctaccaacaccctgaccgaatcagtcacaagcttatctgcccacccctatagccacattctcacttaaaatactgcctccaaatggcttaacggaatgcctctgaaaactgaacaccaaatcgacactgccaaaaaacacagtcagccctgaattcagcccacctcctcccatttatcctctccaggtgaaaatcattactgtaattttttttttctttgtctaaaaccatacctcccggcactttgggaggctgaggcaggtggatcacttgagtccaggagtccgacaccagcttgggcaacacggcaaaaacctgtctccataaaaaatacaaaaattagcctggcacatagtggcacgttcctgtagtcacagctactcaggaggctgaagtgggaggatcacttgagcccaggaggtcaaggcttcagtgaccgtgatcatgccactgcacaccagcctgggcaacagagggagagagagaccatgtctttaaaaaaacaaacaaacaaacaaacgaacaaaaaaacaaaacaaaaaaaaaaacaagaaaaccatacctagtgttcttcagttatacacttttctcaaattcatacacacacacacacaattataaccatttcatacttacaaggggtcctttcctaagtgacattaattcagaatgtggggttccccttctctagtacacccttaccatcaaaccagctccatctggttaaaatacagccccaatttccctgctcaaaaattttcactggctcccaatgacttcctcagtattagcggatggcccttcatccaagaccctccgggacagtcatttcctagccttatcttctgcctgcagaccacatcacccagccaaatgtttcctgctccttagacacaagtcacccttcatgctgtttcagtcaccatgcccacacatctgtccttctatgaagatctagtcaatgccatctcctcccaaaagtctttcctggttatggccaatccatgatcatctcacacctttgaactgcaaaagcacttcttactgctgattaaaactatcactttttgcctggtattctaagcattcttaaacggagatgacacctcgagccctcggctagcctgtaaacgccttgagggcagcacctccaaccaaacaccctgcacataaaagggttatctggatgtgatgaagtaacttgctcccagacttttcatcctagaggccctgagggtcaggaagaactgtaagtgaaagggagccatgggcatttctgagcaggaaactcttgcgctggacctgcattctgagaaaatcaaggtgtcccggcagagcagaaaacgctagccttgcagtcaagactcacctgccacttacaaggtatgtggccttggacagatgactctcccaccacggaccacaggaatctaatctagaacttttgctttcagagtaaattaggaaaggcagataaattgtatcttaagttccagtttcctaggggtatcacctgcaatgatgtagagattccaagactccagacagggatgtgccctgttctcagtttccatgacagacccggaaaggtgggcagcaaagtgaggccatggatttgccagccctgggccccgtgatctttaaggtctgacatcattggatttggaaaggctttgagatgctcctctgggaactcaaaaccctaaaagtctacagggttgttctgcaacggagatgcagaactccctgtgatggaagacataaaagggaaagacggagagacaagaggaaggagggaaggaagaataccaacctagtattaaaattggtcacttgaaaacatgcaagccctgtgattttcatcaggaaactgcacaaaaagtaaattcataatgtcttttaaaagtttgcattcctctgattaaaatgttctggcttttgaaagcaaatggtgatgctaaatgtgctgggcacaatggttacatcaggaagaaagacggtgcagctcagaacgtggctctgcctgtccctgtggtttgactcaacattgctcagcctcccctcttcatctgaggtaacagcaacaactatgccccccacacaggatcactgtgagattaaaggggtcccacgtgtagcatagtgcctggcacatggggagcaaagagtgaaggaaggctggctacagttattatcaccatcatcaagatcatgactatgtcattagcagcatatttctgtcagcgtgttaatgcaaaacaattttttaaaacagaaaagttacacaaaactgagaaagaaaaatgacgtcggtcagcccgacctagtcttacaaaattacttgctggcttttctttggtgtctggttttgatgccagccaaggaacagttgtcactaactcttttcaatttggtggtgtatcttatgaagcaagaggtgcttagacaaagacacacacatgttcaggctggtatacagaaaagaactgatctgatagaaatgaacatcctgtgctttcaggtagaaacaaaggagtttttcaacagagtgagctcagatcttgtattctggagcttcagaggaatacagcaagttaaaatgacactttttcctaacagctcgccaggataagccaatgaagatgggtcacacctggaaacaacttccatcaacccctggcaggggtaaaaagtcatttgtggatccctttcacaaaggtaaataccaaggaagttctgcagtctggaaggtagagtggcctacattcatctcgcccaacaagcagaatgcaagatgcacccctccaggggttcctgctttcactcacaaatccagaatgccctggtcagttctatagcagaaaacccaagctcactgggcgtggtggctcacacctgtaatccccggactttgggaggctgaggcgggtggatcacttgagctcaggagttcgagaccagcctggccaacatagtgaaagcccgtctctactaaaaatacaaaaaattagcaaggccccctgtaatcccagctacttcagcctgggtgacagagcaagactccatctcaaaaacaaataaaaaataaaaggacttgcattcctcgaataaaagttattttctcattatcaattgtaaacctgtttttaaatgttgataccaactgacaatatcaaatgtaagacagtatctttaaatcaaagtaaatacaaatgatctaaagctttaaaatgaggaatacacgccgggcatggtggctcacgcctgtaatcccagcactttgggaggctgaggcgggtggattacttgagctcaggagttcgagaccagcctggccaacatagagaaaccctgtctctactaaaaatacaaaaaaattagccaagcgtggtggtggacgcctgtaactccagctactcgggaggctgaggcaggagaattgcttgaacccgggaggcagaggttgcagtgagccgagatcgcaccactgcactccagcctgggtgacacagcaagactccatctaaaaaaaaaaaaaaaaaaaaaaaactatttctacatggttctatagcttgtattctcaacggagcaagaaagcctgtaataaatacctttgcaaatacagaacactcagcagatggaatgtgaactttaaaatatgcccttaacatgttactttaccaaaattacttctcattcatacccaggcatcttggaaagctacatccatttacacagcaaatgagcagtttgtagaaccacacggcacaccaaaaacagctgacacatctccttggatttaaaacaaagtcatcccagcatctcattttcatcctaccatagccttatctaattctttaatgttctctttactttgatgaggaatttaattataaacaaaaaaagagaaaatacatctataaacgcttgccccacaactaataacacttagatattatgttagttataacatgtttaaccttgttctcatcagtgttcatttaatgttttaccttttttcacttggcctagtacaagcatgtttcattctgctatatagactctatgttgtttcttctaatgaataaccgtggctgacttcaccattttcctcttgttgaacttctgaagctattctaatggtttcggaaattaaataatgtgggactgaatatccttacccataatttcagttccctagggataacaagtattacagaggactgcaagggcatgaacatttttgtagatcttgataatcatgccaaattgctgttccgagaagatgcagtcttttacacaacatcaccaacaacgtccaaatgcaccaggccactgtgactttgcagcgtcaggtatgttaatcatttttggttttgccaatttaacaggatataggataatattttaacttttgagtctctgaagactaggtttattcggtgcttttctgtggctttttactggttaattccctcctttgtgaattgcccacttgggtcctttgggcaaacatccactaggcacttaatgttcttctcataaacttgatggggttaaagtgcctcataattgttttgcattttcaattagaagctttcataatatgaaagaataatagagacttaattccatcactgattagttggataaatgttcagaagtaaaccaacattatcactacccccaaggactcccacctctgggaaataaaatgtgctttactttaagccagtggctttccaagttactaaacacagtccacatttctcacccactactgctttccactagaacaaactcagtgataaaaatggactatcaccacgtaaacagaggggagaaaatacacacctatttagaaacagagtcacaaatgagtcatattttaacagcaaaacatacctgacttcaattctcattattaggaaattataactccaaagcactactgatgctaaaaacacagcactacatcctatagatctggccaaagaactctccacaaactgcacggagtcaccttttaggcaaggcttggcttctaaaatcaaggctaaggttaagacaaaattatccttgaaaattacttaaatagcacacacagtaagcacatgtggttttctgagtgctgcattacctttcacaaagcctaaccctgccaattttcctgcagcattggaagggattgctgtttctatggttgaataccagaagaaacgcatctggcctgtatttaaggagatgttgcatgaaaaaaatacatattgttaattatttttaagcaaacattgagacttgaattagtataagttaaatgcacatgacacaatgcaactgtaaactgatgataaagacaaatgaactaatttataatttaaaaccaaaacaaaagcagcaattgaaaaccacaaccaactcaacactacactgatcttataccaataaaacatccttctcacaattggcttgaattaaaactacctgcatgcacatatgtcattgctttgcaatcctgccaagtactaagtgacatccagactttagaatactgaactgaaatcatcaatgaaatctagcaatttcactggtatctgtatttgatataatttttcatttacagataccaaatttcagtgactcctggaagtttacctagttacgaagatgtatgtaatagtagaacccagtggaggatttacatcaacactcaaggtttctcagtaattgtgctctgaagtcaccgctgtgaaaacaagtgccaaacaaataaaggaaacaaaaaatatgagcaaaagtgggcattttttaaagtcacaaatcctttcagtttggagacttacacaacatagaagcagcatagaacccaatatttcaagctcatatgacagagcagctgctcaaaatacagcagcactctaaatttatatactactgaaccaagattgaccaccaaaaggaacaaatcagtcaggcatggtggctcacacctgtaatcccaacagtttcggaggctgaagcaggaggatcgcttgaggtcaggagttgagaccagcctgggcaacaaagcaagacctcatctctgcaaaaaaactagccaggcatggtggtgtgtgcctgcagtcccagctacttgagaggctgagacaggaggatcactttagcccaggagtttgaggctgcagtgagctgtgatgcacaactgcactccagcctggacatcagagcaagaccctatctcaaaaaacaaacaaaaagaaaggacaagtctccttacaggaccaagcctgggcaggcaagcagaatgcaaggctgccagttcaaggtgccctttgtccaaacaatctactacaagagatatatgcgtgagagaatgaagaaatttgggtgcaaatataaaggaaagcaaagtagatgaagtattgctatgagagtttgtcacttactgcctaaagaaaccaaagaagtggagagaactctctcatttttttaaaccacacaaatttgtacagaatcaagatgtaaagagaaatctgtaggtattattctagaatttaaaagacatatcataagaactcttgacccacctctgaaaaagcaataagcaaagctatcatcctcaccaccttcatgcttttcaattaataactttgttcattttacaaagtaatatatggccaggcatggtggcttacacctgtaatcccagcacttcgggagaccaaggcagaaggattgattgagctcaggagttcgagatcagcctgggcaacacagtaagaccttgtctctactaaaaatttatatatacaaccctataggctcatggttgaaattttggaaaagtacgaagccaataaaattcatccataactctgaccaaaaaagaattgatcagttaggcagccaagaaccctggaagaaagtgagaatataattttggaactagtaacaagaagacaagggaacaataaacccagcaggacaccatctctaagctctgagaactaattttgacaagtccaagaaaaatatacctcagacacctacaagagattactatttatgtggcacaggagacactaacatacgacaatctgagaaagacagaatggcatgatccaaagcaattaatctgactggctagggagctcagtttttaaaacagcagatctaaacacttcaggggccagcacatggccagggaggaaacaaaaatgtggtatgaaccacagggaactttgtcagaagacaaatccagaattagctgaagttcttgaacaattttttttttttttttagtaagcagaggaaggacagcaaggttttaagctatatttggggccaggaagagataagctacagatagaatacagctcctattaactaatcatatgttctcttggtctttcacaacagaagaatcttcaaactagtgaaggaacaacattgtgagcagaaaattagaagcctcctcccatccgaattccaccattggtggaaaaagaaaacaaaaaaaaacaaattaaggagactatttccaagtattttcagtcgtgtttttttgtggggggggggggcgggtgggggatggagtctcactctgtcgcccaggctggagtgcaatggcacaatctcagctcactgcaacctctgcctcccaagttcaagcgattctcctgcctcagcctcctgaatagctggacttacaggcatgtgccaccatgtctggctaatttttttttttttttttttttgtatctttagtagagacacggtttcaccatgttggccaggctggtctcaaactcctgacctcgtgatccacccacttcggcctcccaaagtgctgggactacaggcgtgagccaccatgcctggccttcagtagtcttatgtcatttccctgctttggaaccttcgaagactcctgcctgctcacaaagcacggacatcttcctatgtgacaaaggactctacactcagtccttcaagccccttccctccaccatcccaccctcttcccctggtggactcagccagatctgcctcagatgtcaatttccctggctggtctctaactcaccatcagcctgagaggagttgagaaggccttccctgcagccccatgtcctcacatatgtgtctcctactccatttccacctttgcaaacattttatacaacctctctctccccgcacagggggctcttagagggcatcctcacagtgcagcaccaggtatacagtagatgctcattagacatttggataatttttattttttagagacagggtctcactctgtcacccaggctggaatacagtggtgcaatcgctgcagcctcaaactctcaagctcaagcaatcctcccacctcagcctcctgagtagctggaactacaggcatgcactacaacagtcagctaatttttttttttttttaagagatgggggttttgctttgtttcccaggctggtcttgaactcctgggctcaaatgatcctcctgtctcagcctctcaaagtgttgggattacaggtgtgagccacctcacccagccaagcatttgttaattaatcaactgattccctgaggaatgatggtgagtctaggaaagagaccagaaaattaagatgagcactgccctccctcccgcaaggaggcctttgggaaagagactgctgccaagttaccaccacatccacggctcttgagttagagctttatcctccagcagccttcagaggtaccactgtccctccatatccgtaatggattagttacaggatccctgtggataccaaaatccaaggatgcttaactccctgacatgaaatggcgcagcatttgcatataacctcttgtatactctaaatcagctctaaatcacttatagtacctaatacaaactcactaagctccaagccaatgtgtgtggctttaggcaagacatttaagcttgtggtatctccaggtattcatctgtaaatggacaggggaaatagggaggaaggttgcggtctgctggattctaaatccctcgggccaaggacagaaatgaggcaaaggctggttcaaatccacttgtttggcaagtagttggcaatttcactgtgctgccttaaccatcatgttctcagctttaagaactgagcatcatgaatgaaggggaacagacttcgtttgtgttgctaaatggcaaacatgaattaacaagggggaaaatgcagcaacaatcaggccaacagagcattttccaataagaaatgttattccctagaattggctgccttgaaaggtgccaagtgcatggccacagacaatatcctccagcagagacatggtggaggaaaatttctacactgttcagaagatctacacatttagaagggacctcttaggttcctttcaactctaaattctattttatgaattacatgactaagaaactatatgtatgctgaaaagacttaagtgacaaattatgtttttaataacattaagagcttgccaaaaaaaagagctggctgtttaaaatacctggtatgattaaataaatctcatttcacctatcgtttccttaacatgaggtagaccagtatttttgttcacaaaggactgacaaacagcagctaactgagaaagctgtcagattctgacttagaaaaatctagcatccttcagcatacatagtatatttagttgttcagtattaatatgtttaaagttacagtcaccatccaaataaactaaagcaggctgggcacagtgactcatacctgtaatcccagcactttgggaggccgaggtgggcggatcacttggggtcaggagctcaagaccagcctggccaacatggcgaaaccctgtctctactaaaaatacaaaaattagccaggtggtgcacacctgtaatcccaggtactcgggaggctgaggcaggagaatcgcttgaacctgggaggtgaaggctgcagtgagccaagatcatgccactgcactccagcctgggtgaaagagctagactccatctcaaaaaataaaataaaataaagcagccgggcgcggtggctcacgcctgtaatcccagcactttgggaggccgaggcccagcagatcacgacatcaggcgatcgagaccatcctggctaacacggtgaaaccccgtctccactaaaaataaaaaaaaaattaaaaaaattagccaggcatggtggcgggctcctgtagtcctaactactcgggaggctgaggcagaagaatggcatgaacccgggaggcagagcttgcagtgggccgagatcacgccactgcactccagcctgggcgacacagcgtgactccatctcaaaaataaaataaaataaagcaactatgcagatatcaccagcttttaaattttcttcaagaaaccctctgaattcagtccttctgtgaagaaagatgcattacctgacacacacaggcaggcagtggaagacattcattagctagaacatttcaatagcaaagcatgcaaaactgcaaatgccatctagacaagatccatgcctggagacatccaacgtggcactttcaaggagacgtgtccatttcaaagtcctatacacaggcaaattccttggtgattttcttgggtctgtcttctctgagtcccttctagctgtagatctaaatgctcggaagtaaacaatgacagtaatgccaccgagtggcacctgaaatcaactgtgactctctacgattccccatcctattctacttccctccatcttcttctttccccggaagatgcattacaccttctggtaatccccatggaaactactgtgaagtccattttaactctgcttcttttgtatgaatggttttaaaattgctgagacttattttattaaaaaaattaatttgctcttgacacaactaacttcacaaactaatcaccaaataccttcctggttttccatttctacctcctgacctgaatgctccttaccatagagatgtggagagcactggctgtaagtccaagtactggtttacggcagatgtcttggagatctatctcaatagccctctcaaaacacgtttgtaatgatgttgaatataaaataacaatttacataataaggtgcataagcacctcctttgcactattaataaatttttgttggcaatattttctagggataaacatctaattattacaagcccataatcagaaaaatgtcttatgagcgtgacattcaggaattatttcttggaggtcatcaggagtcacaataggaggaaatcgtgccctgctgttaaaactctaccagaattcattaataaaagcactgctcagtagaaatgtagtctttggtctcctgtctattttatccccagggacaacagtacgccctttcttttctcttgccgcagttttttacagaagctgtattttttatcataaaaggaggggaagctgccattcaaaattgctgttattttcctattctgtttctctggataaaacaagacttctaaactaacaaaggacaataatcagtgcggaggcaacatacgctgaaataaggaaatgctgaaaactaacattcaccacgccacacataaaaagcagctgaaactcaacgtgaaagctaaacctcaagatatgacttcacacagctataacgggaaacataaaagcaacttgggatttcctctatttgaagggatgcatttccgcttactttgtactttccttgaacttggagcaggacatcactcttgcatcccacgcttctcagctcaggctcggtatccaaaaaaagctctgtgcctctggggacctggggcacccctcccccctctagcctgctggagcacccacatgtgcagaggctcacacgagcataaatcaagggacatggctgacactaagcactgctgagagcctgcacagctgcagacgctgctcacaagtaaaagagatacccctctgcaggaggcagctgcggtatttcacttgcccctctgaccaggacccatgcagtccttggaagagctgggtgctccctagggcaactggtattttctgtctgctctttggtcacttcccattcttttttactggtttctggtggtttccacatgtggacaaatagagcataataaagaggtctgccagatttcagcctcctttcacagatgaggcttggtttaaaaggaaaatgaacgaaagaaaacttacaaaaccaacagcctgatggtacttttaggaaaaggttagtatggttctgtatgaatggtaggtgacagctggatctgattctctaaatataccaggccttttcctacaagactttataataacttatttgttcttaaattcaggtggggcctctgggaggaaaagttgagtgcaggaaaatagaacaaaaattaattaacagtttccaactgtaacatgctcagcactatacacagagtgtaaaagatataaaatattgcccccgacctagaacacacagttctgtggggtaagacagccaaatgcctgaaccaatgacagaacactgtgctctatcggataatccagactgaactgaatggcccaaaaatcacaaacatgcagagggcagtggaaatgttcttgaacgttttagacaaacagaactgtataattaatggattttccccttcacagtacataaacattctgaaaggtagtacctaaatctggcacctactgagaaatgctgacacagctgcaatgattttttagatatttttaacttgtaaagagaacagagtaaggaagtgcactttgacccaattttaaccatctgtaatttttttcttccaatcatcctaactggcttctagacccaagtgctaatttgattgcaaaaggaaagctgccaagaaattatggaggcctgatttaaggacagcatgtaacctgaacacattgcagtcaagcagtgtgtatgaagagagctatacctgtaaggaaagactgaagttctaagacagcagaggcagaatccagcctcctccactgggcgctggagcaaaattttagaaaggttacccagggaatcttgacaggggactgcaacatgctcagaggcagccagaggtgctcaaccagccttagggcacatcaaacaacctccagtgagaactctccacccttcttaatcccaaaatgttaaaatcaactccacatccattctttttaaataactttaatcctcacaacgacatcaaaacattttaagcactatccactccacttttggctgatcgaaagacttaacagtagacattatttcctctacacataaaacactgttacctctaccccagcaacttacggagattaatttttctcccatccccactctacaccaactttattccaagaaggacttaacgtgagaatatacaaacattaggaaagttttttttttttcttttttttttgagactgagtcttgctctgtcacccaggctagagtgtagtggcgtgatcttggctcactgcagcctctgcctcccgggttccagcaattctcctgccccagcctcccaggtagctgggattacaggcatgcaccactacacccagttatttttgtatttttagtagaaacgggtttcaccatgttggccaggctggtctcgaactcctgacctcagatgatccacctacctcgacctctcaaagtgctaggattacaggcgtgagccaccatgcctggccaaggttttaaatcttatgtactttaaaacattttaagacatgtttgtcagggtgtcaaaccttaagatttagttgagtcaagttgaatttacttaatccaagggacaataggtaaaaagcattaatttgggagtataacacactgaatgatggcactctgatctagaaactgggtttctaaatacactctctaaaatacatttatctgaatttttaaatatttctgattggcctccatttttatttggaatagttttgcctcaggatatattttaatcatttaaggatataagtcctcggccaggcacagtggctcacgcctgtaatcccagcactttcggaggccgaggcgggcagatcacaaggtcaggagatcgagaccatcctggctaacatggtgaaaccccgtcttcactaaaaatacaaaaaattagctgggcgtggtggcgggcgcctgtaatcccagctactcaggaggctgaggcaggagaatggcgtgaacccgggaggcggagcttgcagtgagttgagatcacgccactgtgctccagcctgggcgacagaacgagactccgtcttcaaaaaaaaaaaaaaaaaaaaaaaaagaatgtaagtcctcttgcacatttataataaaaacaagtgattatacagttttgtcacaaaagtataatcaaccacatcataaaaactttagaaagaaaaaaagggagaacaacccataatcccattactccaaagcaaatactattattggcttagtacgttgccaaatcacttagtgcatttttttttctaactacttggaactagactatatatgtaacagcaactcattaagtggtttttcaaactttcacagttttataactatcattctgtcatttaaaatcagtattctaggccaggtacagtggctcacggctgtagacccagtactttaacaggctgagcaggagaatcatttgagtccaagagtttgagatgagcctgggcaacataaagagaccatgtctctacaaaaaacttcttaaaaattagccaggcatggtgatacacgcctgtagtcccggctacttgggaggctgaggcaggaggattgctagagctggggtggtggaggctgcagtgagctgtgaccacgccactgtactccatcctgggtgatggagagaacttgtctcaaaaaataaaataaaaacatcagtattctaaaaagttaatagtattccaagtcataaaatataaatagcaatatataaaagagtaaagaaagaaaactgcagccccatgtgagacagaaggagaaaaaaagacccacatgttttaggatcttttacattccccaatgaagatgtgaatactaacaagagtagggcaaagtggagataaacactctcctggtattttccaacatactttttttttttttggagacggagtctcactctgtcgcccaggctggagtgcagtggtgtaatcttggctcactgcaacctctgcctcccaggttcaagcgattctcctgcctcagcctcccaagttgggattacaggcacacgccaccatgccaggctaattcttgtaattttagtagagacagggttttgccatgttggccaggctggtctcgaactcctgacctcaagcgatccgcccgcctcagcctcctaaagtgctgggactgcaggcgtgagccaccgtgcccggccccaatatacttttttaaggattttcttccccttttttccccgtctcttcatcccttctcatcttgtggaaggctgggaaagttaaatatcctcacactgtcaagcggaaacatcactgttcatcagcgcaaaacctccctgctgtgatgtacaacagtcatttttctagcattcattcccattttcacctcttaatgtcctctttgaaaagttagtgccagaaatctcatcactaagtttcctccctgccttagactgctggaaatggctaaaaaggatactggaatttatttaatttataggaacaaatattaaactgattacttaatatatgtgctgcagaaaaattctatatgtggactactagacaaagagttctaaggacgattacagggaaaataattgctaatgcctcatgcaggaatgtcattaatctttctgtctatgcaaagctatctgagatgttatactttttgtttaaacacacaaatgagatataactttatcttttaaaaaataaatggtttttcaaatctcaaaaaacctcaatatccaaaaacctgcacatgtatcacacatttatgcttttgaaaccccagaaatataaatccacaattttatatccttaattttgcattttgcaacttatactcttgaagtacagaataatcttcttgaagtaaaagcattttttgcatcatactttttttttttagaaagaaaaagagtccaggcacagtggctcacgtctgtaatcccagcactttgggaggctgaggcaggcagattgcttgagcccaagagttagagaccagcctgggtaacacggcgagaccatgtctacaaaaaaattagccaggcatggtggtgcatgcctgtagtcccagctattcgagaggctgaggtgggaggattgcctgagcccaggatttcaaagctgcagtgagcagagatcacatcactaatgtgcatttataaggcacaaatgggacaggctcatgtgaaggtcttataagacatgggcggaccgtgtggacagagagaaatttatctagacattaggaaacttttgaatttcactccacgtaacattccagagaagaaaaaaaaattaatactatacattgctcttcaaactattttatacagaaccctagttcaaagaagcactttgtatgttcgcctgaaaatgtaggaccagttgatgtagttacgtgtcatctcctgggtgacagagtaagaccctgtctcaaaaaaaaggaacagtgtcttccctgcatttctccccaccctgcgcatcttcctcttcttcactcatgtgtgtggtaaagccaataatcagtgacgtaatgtcaacagacagaggcagacatacaaacgaaatcacatatgaaatacagaactctgacaacttactttttccctctcacccagctaactcatctctttaggctttgcccatgaggctctgtggaagctccatcttgcaaatattctcagcagatgagcccactcaatgtcccatcccaatgtcagagtttccactacatgttatttattctcacaatgactcttcctatcaagtattttgtgttctggccaaagctttgacccataactattgactaaaagtggtcaacagatgatgaaggaatagcccaaagaaacaaagaaatatatcccactagatgttaaaatacatattttacagcagttaggccccataagagaaataacaaggaggctcttagggatggcagaagtccactgacattttgaacagccttataaacaacagtgccacctgggaggactgatcagcaattttatgaatggcaaatgcaagtaaccacagacccaggcatcttattacatctggggattagaaagaaatggaatgtgcctgccagcgtatgacagggacagatctccatgagatccacacactgatccaattaatgtttctatttaagtactctgtaaaaagccacttaaaatttatccactcctgacacttactgcttactaggggccttttaaaaactgaaaaatgagttttaggatcctacatatatttcttttccaatatacatatatagatttggtttttggaaggccaaaaatggcatgcagagttcaaagagatcattattttaggtagatcaaacaaaaaaactggtagatagacagttgcaatgctctaaacacatgttatctaaaacgactagtctaaaaattagcaccacatccagctcaaaagtcaagtaaccagaaaactgctagatcttttacatcttttatcaatccttagagacttagcaaaaatccctatgaatctactatacaccaagaatataaagataggccaggcacagtggctcacgcctgtaatcccagcactttgggaggccgaggcaggcagatcacgaggtcaggagttggagaccagctgaccaatgtggaaaaaccccaactctactaacaatacagaaattagctgggtgtggtggcgggcgcctgtaatcccagctactcaggaggctgaggcaggagaattgcttgaacccaggaggcgaaggttgcagtgagccaagatcgcgccactgcactccagcctgggcaacagagtgagactccatctcaaaaacaataataataattccaaaatggcagagtcttaaggaaagacaaggtactaatcagataaccagatgaagttacccacgtccgtaagaaggtgagcagccaagcaagacttgtcaaggaaaatgctaagggcagatgctctttacagctggtctcagtaaggctgcagagcatttgagcagcagcacaaacaatgctgcagagaggtactcagcatttttatatctcgttaaagatggaagcaatccctgaagactgaaaaagcaaattacatgtgtatgtcttgaaggggagaaaagataaccgtcatagtcataatccagtcaggctaggagaaaatatatgaaaaatgtccacacccaaggcacacagcaaatgggcaaccaacatccttttttttttttttttacttttgagacagggtgtcactctgttgcccaggctctggtgtacagtggcgcaaccagagctctctgcagcctcaaactcctaggctcaagcaattctcccaactcagcctcctgagtagctaggactgaaggaacacaaccaccatgcccagctaattttttttttttttttgtagagacagggtcttgttatgccatccaggtggctagcgaattcctggcttcaagcaatcctcctgctttggcctccgaaagtgttgggactacaggtataagtaacgtcgccccagccccagcatgcatttataaagcacaaatgggacaggctcatgcaagggtcttacaagaccacgtggacagataggaagttatctagacatcaggaaacttttgaatttcactccatgtaacattctcaggaaagaaaaaaattaatattacacattgctttccaaactattttctacagaaccccagttcaaagaagcactttgtgtgtcacccagaaagcgcaggaccagttgatgtcatctcccaactcagcactctgctccattaacatggacgactctaaacacctgatataagatcagccaccaccaccaccgcatctaccacgcagccactgcctacctgggccaagctctaggtccagttcttttttttttttttcctgagacacagtcttgctctgtcacccaagctggagtgcagtggcacgatcgcggctcactgcaaactccgcctcctgggttcaagtgattctcctgccttggcctcccaagtagctgggactacaggcatgcaccaccatgcccagctaatttttgtattttcagtagagacaaggtttcaccatgttggccaggacggtctcgatctcttgtaggtctggttctttacatatgtatctctcatacaatcttcaaggagaagagggtattacagctccactaacatatgatcaaaatgagactggagactgcagtcctgggcccagccactcaacaacggctgcaaaaacagtggcagcaccatcacctactgacccaggaggtcccctccttggcagaggcagagagcactctcccatgcaggccaggtatacactggcacaccccatctggaaagcaaactggccaagtgcagaaactgagggccttgaaatgttcataatttcctatccaataattatacttcagaaaacttgtcaataatatacactaagattattacaatattttaaatgatgaaaaatgagaaaattaattaacttcccaacaatagttaactaggttaatacttgtatatccacataatgaagtgctatacgacctctaaaaagtattatgggctgggcacagtggctcacgcccataatcccagcactactggaggccaaggcaggaaaatggctggagcccaggaggccgaggccgcagtgagccatgaagaattgtgccgcagcactccagcctgggcgacagagactttgtctcaaaaaggaaaaaaattaccaaaatttttgcgagacatgggaagacaccgataaattaagtaaagtaactaggaacaactgtgtatgcattatgatttcaattatcaatatttttaaaagcatttggtcaggtgccatgactcacacctgtaatcgaaacactttggctggccaagacaggaggatcgtctgaggccaggagttcaagatcagcctgggcagcatgctgagaccctgtctctacaaaaaaaaaaatacaaaaagttagccaggcatgatgacatgtgtctgtagttccagctactcagtaggctgaggcaagaggatcactggagcccaggaggtcaagtccaccatgagctctgatagcaccactgcactctaacctgggcaacagagcaagatcctgttaccacccgcccccccaaaaaaataagcatttgtatttatatatacacaaacaaacagaaagaatgcaaagaaatgaaagaaatgctcttttgtagattattctgggtggtaagaatatgggtgtttactatcttctttaaaatcatctgtgctggccacatttcctacaataagtatgaatttattttattataaacaattaaagcttaacatttttcaagaaaacatccagtatgcttgctcaaaccagtgtctccatggcagaatcctgagctctgggaagctgaaccagaaactatacagacaattcagtggcaggagcagaccgtttgaatcatgggaaagctttgagttgtgataaaacttgtcatgttctgggttaattattgatgaatctggaaattgcctcatttattaaagacttatgtgctttcaaaggtggaggcgtggtgagcaagcagtttctagactgtaatgggattacttgtggtgttctcaaaggacaaaatccaataaaacaaattgtagagtgtatgtgtttaaataaaacacgctcacacattgtcttctacttcctctgctggcactaatttaccaatcagtctgatccccagggaggcatgaacagtaatgacgctgatgcagaaacaagaggaaaaaatatgctaaaattatttcactgggaacagcactgagcagccacagcagagtaactgaaagtgacagagaatggaaacttagcaactctgctctccccctgataaggctagcaagcccagactgaaatcctcctatccttaggatgcttctgttagggccagaactgctgaaaaaccagcatccatgcaatgcagaggctgcaagcaaatgagaagctgaagtaccaggaaagaggaaaaaaagaatgagtattctctttaaaatgaagcaaaaaataaataagttatggctgagttgataaaaaattttaaaagatgaaaagttttattgtaagatttgtgtaaatattccagcaaatgtatcctaatgtaagtagggttttttccttaagatttactaagtcatacaaaaactgactgcatttctttaatctgtgaagttacataaaaaaatcatttagtgcttgaaagaaaccaaaaaaatggcctgtgacccaaaaataaattccaagcctttcctggaaattccaacagtcagttatggccatcccttccatcccagcctcctacacgcatgcacagggaagcgcatgcgtggcacgcacatgggctcacacacagacacacacacttactgatcatttcagagtatcaaaaaatacaaaataactcacttggaaaaaaagacaagtgcagcccaactgtattctcaactgcttacttctctattcagttagataataggaaatatgactgtttccagtaagagcattcaaaacctggctagacataaactatcactgtgtaacattctacactgccctgagtgagaagcactgacgcttgtacccgtcaccaacgagcagcagctacatagggagccaacagccaacgcaggcaaccctgacagtcccaggtagaagccactggcctgagtctcatcacctgcgtccctctcgatgctccaccacactgctggcagccgcaaaaccaaggctccaaagctccccagcatcccactgtgggcagcgtcatcaccaagcccgggaccaggccggggcctcctccccaggaagccggctcgaagccaacaccgagccctggataaagaggacaagctcctgagctcctccaaaggatggcttcagccctcacgagaagagacaagacgcggggacatgtggcaaagaaggacagtgaaagagccaggtccccacagcctcaacccgtcagagccaggtgtggtagtgagcgcctagagtcccagtgccttgggaggcccagctgtgacaatcgcctgaggccagggattcaaaaccccatctctacaaaaaaaaattgtttaaattagtcactgtagtcctagcacttcgagtggcagaagtgggaggaccactggagcccaggaggtcgaggctacagtgagctgtgattgcaccactgcaccctagctaaggagacacagtcagaccctgcctcgtttaaaaaaaaaaaaaaaaatcaggacactgcctgagacccttcccagggagccaaaattatggctgtcacctcctctgacccaagggcctacaaactgaatgttttgttacacacggacttccctctctgcttcctgctttttcaactccactccaatctctcctgagcctccctcggccacctcccaggatgcatcacgtgctcgcctcgtgacatgcgcccaggtgctcgcttgctcagatatgcgccctgttcctgcctcaggatgcgcgcccacgtgcttgccccggacctgtgcacccctagctctccccggacgtgcgcccacgtgctctttgcggagctctctggctccacccaacgctgggtgggagaagacctgtggagacagaatagagtctacaggctcttccctgtaggaagaaaagtacaaggtctcgctgtgttgccccggcaggtctcacactcctggcctcaagcgacgcgcctgcctcagcctcccaaagcactgggacttcaggcacaggtaccgcacccagcaccagctctctgtttttctttactacagtagcacccattctcccattatcaacacgtcacaaactctacttagcagagtacagcaaatgctaaaatacacctcaatattcacttatgtttaattataaaagattaaaaacacccagagtcacaaagccaggagtatttcttaataacagcattagtcgtgactgccctgcagttctcaagtacactgttttcccacaaggatacatgtccccctgttctgtctacctaggaacaagtcgccacccgctggagctgcacctgcacccaggaggtctacagtgacctgtgcagcagcaaatttggcagcagaaagcagaggactccaggcactgctcatgcctacaggctgctgggtgaacaccctcgccaaagaaggagactgcagaaatcctccttgatggtatcagctcactcgctcttaaatgttcatccacttttaattatttacaactaataaaacatgtaataacacggtcaaaattatcggagtaacttcctttcaaaaagcacatgtttgtacagtgattctttatataccttgaattcaacataatctacttttgcatctccctgggttgtgggtggagaatccgcaaaggcaccatctggacaatgcctggggctgcagcagggactgcaggtgtgggctccagcagtggcacttggtgtggcactgagaagcccagggtggtgcagtcagccttgagcccacctggggagccggggggccgtcgcagaggccacaaagagctttctgaacaaaaagcacagctctggcagcagtgcagatgaaaaaatgggagagccaagaggagagggaaaaggaggggcagagtatcccaggccagggacaactcacgaacacaagggagctggagggcagtaggactccagggcagcagtgagagtcagttctgccatgatcagggagagggaaggaaggggtcgtggcggtaaagagaagagggcaggctggggtcagttttcaggctgataaatttgaattctacttggaaaaccacacagaacccatggagttctctgtactagtcagggatataaaagccatccttagaaagtttactctgggaaggctgggcacggtgcctcacacctgtaatcccggcactttgggaggccaaggcagccagatcacctgaggtcaggagtttgagaccagcctgaccaacatggagaaaccccatctctactaaaaatgcaaaattagctgggcgtggtggcacacgcctataatccctgctacttgggagtctgaggcaggagaattgcttgaacctgggaggcggaggttgcagtgagccaagactgcgccattgcctgggcaacaagagtgaaactccatctcaaaaaaaaaaaaaaaattttactctggggaaacatgaagggtggatcacttcacataagaatgcaatattcatgaaccaggagataatccataacaaatggtgcctgaaaaactgtttatcccctgataccttcaattagaggtaaagtatctcattttaagaaaaatggaatgtatttaagtaataccacatttacagtcgacttgcaccttactcaaaggataagctctaaacagcaaaggtaagcaaactcaacatatggttgaattatacttgaaaactccattcaatctcccgtaagtacaaagagacactcccacagtcagcggggggtgggggttggggggactcatgaacagatatcacaaggggacaagggtttccacttgcagtgtcaccctcagtcctggccatatactcagtacagggatggccacataaccacctataccctttccactgtatttttctgcctctgctgaggatgtagactttttaatctactacagacatccctgcaatgccatacctctaaaacttctcccccaaagaatttcacttcagaaaaataactgactcttcttcaaatatgacatctctttgataaatagtatattatgtattaccaggcacacaaaagttaatttctatcattttccaaaatcttatctaagaaaggcagattcacagaagttctatcagtaaacagatcactacaagaactgccttctgaacactgttcattagtagaatgatgaaattactgcattcccacctctgtgtatgaacttgggggtactactgcttatggacttcacagtatattcccataaagaaatgagtggaaccaccactttgaacctcttagaagatgccacataaacctaagatgttattatcattatctctttctaccacatagcctgggaaagttgttagatctttgggctcatgaaatatgaacacaaactacttcttaagtttgtcagcttcaaaagttcaggacatacattttattgcccttgcccagatcaagaaaaagatgactttgaaacatgacacataacaataaaaaaaaatgtttgatgttatatgtgatacacacgcatatgcgcacatacacacgtatctatggcagaataaagatgaccacaaggccttggacactcctcacactgacaagtggagtctgcatgccctgccctgaacctaggcaggcttactgactaatttggcaaatagaatacagggacaataaagctgtgctgtcttccaggtctaaaacttgagagagtgacagctgcttcttcctgactcttgggatactgtccaggagccctgagccacagtacaagaagtccaaccatccggaagcctctatgctggagacaccacatgcaggtgctccagtcaacaagtcccacctgagggttgcttgcactgaaggacactggctgtgggattgattgtggctttggcaagattaaaatcacggcaggtccggagggagatgcccaattccagttcactggtagtaaaacgtatttcagagcaggcatggtagttcatacctataatctcagcactttgagaggccaaaggaagagcctcacttaagcccaggaatttgtgaccagcctgggcaacatagtatgaccctatctctacataaattcaaaaattagccaggcatggtggcacgcatctgtagtccctgctactcgggaggctgagaggtgggagaatcacttgagcccagcattttgaggctgtagtgagctgactgcaccactgtactccagcctgggcaacagagcaagaccctgtctcaaaaaaaaaccgggcgtggtggctcacgcctgcaatcccagcactttggccaaggtgggcggatcacctgaggtagggagttcaagaccagcctgaccaacatggagaaactccatctctgctaaaaatacaaaatcagtcaggcgtggtggtgcatgcctgtaatcccagctactcaggaggctgaggcaggagaatcgcttgaacccatgaggtggaggttgtagtgagctgagatcgtgccattgcactccagcctgggcaacaagagtgaaactccatctcaaaaataacataacataacataacataaataaaaaaattaaaaagtcaactcttatactcacacaggtgggatgaattgacacatagagacattgctttcatgatcttacacttcaagttaagatctttaaaaactccagctgtgaaagcagtataaatgggttccaaactgtgcctcatctgttaaattcccatgctaatctaagttccatggaaaagctaatgtcaactcatcatgtgataattcaatttgtacaataaactatgaacctgaaaaaacaaaaacaaaaaaaagtcccagctgagcccaacattctagttagttacccccaccaaacaccagatatatgaatggagccatctaggattttccaggccaggtcatcatctgccaggtaaatacatgcaagtaaccccaagtggcacggaagaataacccagctgagccctgcccaaattcctggcccacaaaatcatgagatataattaaatcattgtttatttaagccattaagttttgggttggttatgcagcaacacctaaatataaactagggttcaaaaaacatttttactatcaacttggggttaagtgttatttgaaactgctgaatattatttttaaaattcttacatggacattactatcagacacattatgtctttagagtaatttctatcaggtctataaaattcagtactagtcagttcccatagttgcagtagatttgaagaaaatattttaaaatagtatttcaaagaactgcactttgcagccctgaaagtacccttgaagaaattatttcctggccagatgtagtggttcacgcttgtaatcccagcactctgggaggccgaggcgagtggatcacctgaggttaggagttcaaggccagcctggccaaaatggcaaaaccccgtctctactaaaaatacaaaaattagccaggcatggtggtgcatgcctgtaatcccagctactcgggaggctgatgcaggagaatcacttgaacccaggagacggaggttgctatgaactgagatcgtgccactgcactccagcctggatggcagggcgagattccatctcaaaaaaaataaaataaatgaaataaaatcaatccatggacataaaaattgtcagacccatggttaggttcatgaggcagcacaaccaggagcttatatttgccaacaacagccaggcccactggcaatctggtgtcatgaggggacttgttcagtgggactgttccaaggagctaagtaagtggttaacaaggtcttgctctgtcacccaggctgcagtgcaggggcacaaccataactgactgcatccttgaactcttgggctcaagcgattctcccacctcagcctcccgagtagctgagactacaggtgcatgccatcccgcctggctaatttatgtttattctttgtagagacagggtctcactgtgttgcccaggctggtctcaactcctggcctcaagcaatcctcccacttcagtctcccaacgtgctggaattacaggcgtgaggcaccgcacctggccaaagtaaagtctaaacatgtagaaaaggaatcccttacctactttgtgaaagtgtgccaacagtcttctctaatactactgctccatccaataaaaatggatgtgtatccataaacaagctcgaaaagcaactcttgcaagagaagtattctgtccactactcagaagccctcatctctgctttacccaaaaccaaataccatagttgaccggtttctatatatacaaacacccagaggacataacctggctcaaaggataactcatatattttatccaaattggcctttccttcccccatctcattacaactcccccgtgctgtctctcactgcccttccttaaccaatttctgtttagtagaagtggctattagactagacatcatttagagtcaacagctaaaacctaaggatgaccttgcacatgtgttgtctctgtttctacaaataaaactcaacaaaattaacaggcaggagaattgaatgacttcaaaagtcaaaaatgaaaatatatccagcctgggcaacagcacaagactcggtctcaaaaaagaaaacacacaaagacacaaagaaaatatacagactggatatggtagctcacccctataaccccagtgttatgggaggctgaggcaagaggatcacttgagaccaaaagttcaagatcagcctgggcaacttagcaagaacccatctctacaaaaagaaaaaaaaaatgcttaatgagctgggcatggtagcatgtacctgtagtcctagctactcaggaggctgaggcaggaagattaccaaagcccagcagtttgaagctgcagtgagctattgatggcaccactatactccaacctggggaacacagcaagtgcaaaaccctgtcccgtgaagaaggagaaggagaaggagaaaggagaagaagaaatgagaagaaaggaggaggaggagaagaggaagaagaaaaaaaaaacatgccgggcgcagtggctcacaactgtaattccagcactttgggaggctgaggcaggtggatcacctgaggtcaggagttcaagaccaccctgaccaacatggtgaaactgcatctctactaaaaatacaaaaattagccagatgtggtggtgggtgcctgtaacccgagccgctcaggaagctgaggcaggagagtcactagaacccgggaggcagaggttgcagtgagccgagatgtcgccattgcactccagactggggaacagagtgagactctgtctccaaaaaaaaaaaaaaaaacccacacatacaggctgatccactgtcacacaagtgaccagcctttgagcatgctggctgatcatctcaacttgtgttttggaaatttccatgcacagtccaaaggcgagcagggttgcaaatcacataatgcaacaactccaaaaggtctggaggttggcctgggccaggagtcctccaacccggctgcacagacaaccacctgaagagcttcctgaagagctttacagaaacaccaatctccaaacgtgacccagagacctcacccccttggtttatatggagcttaggtatcaacattctaaaacctttgctgccaaggttaagagcagttgctctagcaccaactggggatgtcactcaggctgaagtgcagtggcgcaatctcggctcactgcaacctccacctcccgggatcaagcgattctcctgcctcagcctcccgagtagctgggactacaggtgcctgccaccacacccaggtaatttttgtatttttagtagagatggggtttcaccatgttggccaggctggtctcgaactcctgacctcaggtgatccacccgcctcggcctcccaaagtgctgggattacaagcgggagccaccatgcccagcctcaatacagattcctatacggaggtgtctagaatgggccccgagattgtacatttccagcaagttcccaagagatgccagtgctgctggcccagaggccacaccagagaagcaagggtctttgacagctagccatgcaccttttttaccctcactagcctgaagctgatcccaaaggtgcacttcttccctgaacccataagccattcaagcaaacccaagtcaggaaaaaaccctgttcttctcccgcgggatcacttactctttcttatggaattgcagcatcttaaaatgcacatcagtttgtcatggtatagcaactcactgtgcaggctctgaagttagagtctgccaaaggcagccaagccggctgggtacggtggctgacacttgcaatcccagcactttggggagccaaagtgggagggtcacttgagcccaggagttgaagatcagcttgtgcagtaaagtaaaacctcatctctacaaaaaaaaaaaacaagttagccaagtgtggtggcgcatgcctgtagtcccagctacttgtgaagctgaggcaggaagatcacttgagcccagaagttcaagaccagcctgggcaatacagtgagactccatctctacaaacataaaaataaattaactaggcataggtggtacatacctgtagtcccagctactcgggaggctgaggcaggaagaatgcttgagcccaggaggttgaggctacagtgagccatgatcatgccactgcactccagtctgggtgacagagcaagaccctcagttgtgcaacttcccaaaaaaaaaaaaagtttcttatcctctctagcccaagcttactcatctgtaaactctggattacaccaatatcacaactccatgagattaacatatacacataaagcactgaccccagcacatagggcctgatacaacatgtgccatgagtgcttaccattactcttgataataatgttaatactggccaggcacggtggctcaggcctgtaaatcccagcactttgggaggtcgaggcaggcgaatcacctgaggtcaggagttcaagaccagcctgataaaccaggtgaaaccccatctctactaaaaatacaaaaaattagccaggcgtggtagtgggcacctgtaatcccagctactcgggaggctgaggcaggagaattgcttgaacccgggaggcagagcttgcagtgagccgcgatcatgccactgcactccagcctgggtgacagagcgagactccatctcaaaaaaacaaaaaataaaaaataataatggtaatactaccattttctgataccactgtctcctggatctcctccttgctgtctgagactccttcacagtaagttaggaatgaaaaaaaagtgacaggtttcactgttgttaaaacggtaccttcccaacaacctcctaaactaataggcagataaataatgcccctgataaaagcacctcttatgcaagagctttcgatcatgagtcctgacctaaaaagctttctaacaccaaaagcagagactgagctgaaaataccactccccggaatctataaagaaagcagcttcacttctcatcggtaaagaaacaatgcagggccaaaactcttctgcctcggactaaaatcccccctatcaaaacactctaagatctgtcaaaaattctccgaattatttctctgcaattttgttataaaacacttgagtattctggaaagtttttgaaagcaccattcatcacttccattagcaaagcacaaaaacaaaggggaagcgtgaaggcaagagacagacgcacaaaaatacattcctatctcccgtgctgctaggtctttttcacatcctgtaggaaactaaaacttggaatttcaaacacactcacatgaaaaaatgtttacaaataaatacaggaagggatcagagtcaaaataggagtgctgtgccattagataagctttactacttcaatcactgcttagcgacttccctaaatgcatatggggagagggaagaagcattactttaattaatgagatgtttaaggtcttcaaagaggaaaacaaccccttcaatactgtggtatgaaaaagacggatgagaggaggtagtcctcttgaatacaaagccagggtgttgataactgcaagtctgacttcatcgcactgcctgccaagcccagaatgtgaatgagccttcaagacgccactccctatttagtatgataaataggtcaactcctgggtgaagtcttcaggtgatttgcactgggtgcctttagccaaactaaagtattaaaagttgcatcaatctgtcaacccttacaactacctacctaagcaaaagatgttctgtgttcctttgttgctgatttagctgcccgaaatcaccatcttaagatgcccaaaatcacatcttaagaagtgttatgggcacatgaattatagaggcctatatagtaaggattagaaaagtcacaaaaatgtcaactttcccatttattttataacacagattatctatttgagctccagggtattctcagaactattactagttaataaacactaaaggcctttaaaacatctctgcattttattaatacagacagtatttacattttatacttttatcctttccaagttttaaaagtatttttaatgaaaaatgtgtaagtgatgccttttaatgtactttaaatacagcaaataaaatttatgtaatttcctttgaagtagcagtgttgcggctgcaattatttaggaagtaacaagtagaaagtcctacacggctaagacagctagacaaacacaattctccttgacctgtaaaagaatcagcttaaactgttgggtgatctttatatcttcattcttagctaaatgatgcatacatactaacactggaatttctaaagcacttttagaaaaaaaaaaaagtagccctttaacagacaacctggaaaaacaacacttgatgtcataaacaagaatcaagctgattttgtgaaatagccattaaaattttgcctaatctatgtttgaaacttgaagagaaagaaaaagatctaatactgacagaatctattacatgaaaggggcattgtctacagtgaataacttaatctccatgacaccctacaaagatgacaatcccaaattacagacaggaaaacagacttacagagcttgtattatgtgtcaaagctttggtctggggggcccaaaccaaaacctggaaaagctcttccattatggacatgtttggagcatccaaatcaatgtcactgggattttatttcttaaattgcagaaggaggtttccttggtgactttttttttaagagagacagttttgccacatgatttcccacatgtggtgaagttctaatgaggatgagataaaacaatttagaaaagcctattctagtgagacttaatcactggcaaacactcctggtaaaaacaaagggacagtacggctaacatgtagtccacctggcctcctacaataccttttcacattctctctttgaacccagacaacaaccccacaaagcaggtggtattaaaaggtaggactcccgaccaggcacggtgactcacacctgtaatcccagcactctgggaagccaaggcgggtggatcacttgaggtcaggaattcaagaccagcctggccaacaagatgaaaccccgtctctactaaaaatgaaaaaaaaaaaaaaaaaaattagctgggcgtggtggtgcatgcctgtaatcccagctacttgggaggctgaggtgagagaatcagttgaacccaggagacggacgttgcagtgagccgagatcaaaccactgcactccagcctgggcaacagagtgagactccgtctcaaaaaaataaataataacaaaaaaaaaaaaatagaaggcaggaatcacgtgctcacaaaggtacttctcttaactctccataaatgtctgggagagattcctcttcagaatcctgatccatgatgtgtcactctgatgtttttgcttcctagaagcaaaatacccatcaccaaactttccactttcagctaacggtgtttttgcaaacatctgtgtgagtcttaaaacgtaaaagacaaaaatgactccaccatagaaagttcaggagttggccgggcgcggtggctcatgcctgtcatctcagcactttgggaggccaaggcaggcggatgactttaggtcagaagttcaagactccatcaagaccagcctgatgaacatggtgaaaccccatctctactaaaaatacaaaaatttagccaggtgtggtggctggaacctataatcccagctacttgggaggctgaggttgtagaattgcttgaacccaggaggtggaggtcgcagtgagccgagatcgcgccattgcactccagcctgggtgacacagcaagactccatctcggaaaataaaaaataaaaataaaaaataacaataatcaagttcaggagtttgttagcattgcaagtttccttggaaaaaatattcctgataggatgtgctttcataatttaaaatatatttatttcatattcctcaacatgacaaccgctaaaatgccaccaccttccagatgcagtaaaaaatagttatcaatccaaatgatgcacttagggatctacttgatttgtttttgttttttttttttttttgagatgaagtctcgctctatcgccaaggctagagtgcagtggcacgatctcagctcaatgcaacctctgcctcccgggttcaagccattctcactactcagactcccaagttgctggtattacaggcacctgccatcacactcagctaaatttttttgtatttttaatagagatggggttttgtcatgttggccatgctggtcttgaactcctggcctcaagtgatccgcccaccttggcctcccaaagtgctgggattacaggcatgagccactgcacttggccaagatcaacttgatttgtctagaagattttttttccagatctctaacaaagtggtaaaggtaccaaatcctatgttcaacattaatgaatttagtgattagtcacatcctgtgttgtagtacatcaggaaccaatatcctgcacattttacctccttcttctgcaggtgctgctgtctgtaataaaagaaatccaagtttagagtataaccctgctgggcaggaatctggctaaccattattcacatatggttttgcacactgggtttcagcattataaatgacacatgttaaatgcctttgtggtataagaaaatacgtttcctggaagagttttcttttttcctttgtccctcagacttctaaagagtttattttttaattttggacttaacattggacttagagaagaaaattaaaacacagacataaaaacttttttccaatttgtattgtctatgtaaaagaaattgaacaaaaaaatctagtctcatatataccaccaacacaaaaacaacactcctttctttgtgtttttaatattaatacacatcttttgattggttagcaattttaggtttttgagacataatatcaagttgatttcttaagtgttgaagaaggaaacactgatttttagtgtagtctatctcaaagaggctttttgaaatatataaaccctataacatagattagttttctaatctaaagggatgcggtacaatcaacaaaaagggaaaggctgggcgcggtggctcacgcctgtaatcccagcactttgcaaggctgaggcgggcggatcatgaggtcaggagttcaagaccagcctggccaacattgtgaaaccctgtctgtactaaaaatacaaaaaattagccaggtgtggtggcaggcgcctgtaatctcagctactcggaaggctgagacaggagaatcgcttgaacccaggaggcagaggttgcagtgagccgagactctgccactgcactgcagcctgggcaacaaagtgagactccgtctcaaatacaagaagggaaaaaccagacactagaaaaatatacatctgagttccaaaaccttaaatcttacagtgtctgaatagttaaaaacaccaagattgggagaatgttgacttgactatcatctctaaaatgacttaaatttataccaccataaaagatcaccccagaaatacacacgtatgtgcatatatatatatatatatatatatacaccgtacagttcgtatcatgcaatatcatacatctgtaattcacaaagggaattgtcttagtcacttctgagcatgatgtgatttacattaaaagatacttaccttgagacaataagaaattctggggccgggcgcggtggctcacgcctgtaatcccagcactttgggaggctgagacaggcggatcacgaggtcaggagatcgagaccatcctggctaacacggtgaaaccccacctctactaaaaatacaaaaaaattagccaggcgtggtggtgggcacctgtagtcccagctactcgggaggctgaggcaggagaatggcgtgaacctaggaggtggagcttgcagtgagccgaaatcacgtcactgcactccagcctgggcgacagagcgagactccgtctcaaaaagacaaaaaaaaaggaagaaggaaggaaattctgaaggacaccctagacaaattttttttttctgttagagacagagtctcgctgtgtcacccaagctggagtgcagtgacaccatcatagttcactgcaatctcaaactcctgagctcaagcaatcctcccacgtcagcctcctgagcagctgggactaaagatgcacacaaccatgtctggctaattttttttttttttttttgagatgaatctccccatcgcccaggctggagtgcagtgtcgctatcttggctcactgcaacctctgcctcccaggattcaagtgattctcttgcctcagcctcccaagtagctgtgattataggtgtgcaccaccatgcccagctattttttgtactttaagtagagatggggtttcactactttggccaggctcgaactcctgacctcgtgatccacccacctcggcctcccaaagtactgggattacaggcgtgagccaccacacccggcctatgcctggctaatttttttaaaaagagacggggtctcactatgttgcccaggctgggtcttgaactcctggcctcaagcaatcctcccacctcagcttcccaaagctctgggattacaggcgtgagccttctcacccagccaaccctaagcaaaatttaccctaactctgaatagcatccatttgacctggagagcaagccccgtcatttcaaagttgggggggtcggggtgaggcaaaatattctcacagcatggagggaagcagtaagaggtcctggaccctgtataaccatctgaaaagccactgcacatcacttatggtcccatgagcaccaaaacaaaccatgcagagcaggagtccctgcacagctcagggaactggcagtgggagtccagcccagcacctctgaatatgagaacatggggaaacagaggctcacagagcttgtaagatttgccaaagctcaaaatttctgggagccaaagccaaatgctggaaaggctggtccattacgtgcatccttggggcattctcaacctccactgcacaaaggtagctggcgagctgggtagaaggagtctctggctaaagaacaattggtgaagcccttagagggggtagggggtagcacacagagaccaggggacctggaggctcagcagccaggagcttaccagacactaaacaggacacattggacaggcctgagaaagcagggattccacactatatggaaaactcctaaagacagccagttttcatttgaagtgttttgagcatctctgatacacatatatatgtcattttatgaaatgctcagaactacaaaatacctaaaaatggagcgttgttcatagtggcttatgcagtctatttttctaacatctttattgacatataatcacataaccataaactccatccattgaaagtatacacttgaatagaactgtgcaaccatcaccatgatcttagaatattttcatcatcccaaaaggaaacctcatacccattcacagtctccatgactccaaactcccagtcctagcggaacaccactctactgtctctatagagctacccactctggtcatgttataggaacagaattatacaatatgtgggcttgctgctatgaacactgatgtacaggttttgtgtacacattttcatttctcttgtgtgcttgtgtgtgtgtgtatatatataaagagtatatataaaatatatacagaatagagtacagagactatatacaaaatatactctgtttaggtgaaaaaaataaataattgatatttaaagtcacttggatgtggagcttgaaattttacttgcaaggaccaatatgagttgatggagaaaaaaggaatacacaaaagtaatatttaaatggcaaaaaccacgtaaagatagcaggccagatgcaagaaggcacagacctatacacgaaagttattttaactttatttactaaaatgtttacttatttactaaataagttaaaacaaagttatttttacttatttgctaaaatttaggccaggcatggtggctcgtgcctgtaatcccagcactctggaggaccaaggcaggtggattgcttgagctcaggtgtttgagatcagcctagccaacatggcgagatgccgtctctacaaaaactacaaaaattagccaggtgtggcggcacacaactgtagtcccagctacttgggggactgaggcaggaggatcgcttgagcctgggaggttgaggctgcagtgagcagagatcacgccacttcactccagcctgggtgacaaagaccctgtctcaaaaaaaacaaaagaaagaaagaaaaaacttgtaaataatgactaaaagacaaaaaaaaatcagtcatctttctactttattcactgaactcggcatttattttgataaagatttgcttttgtacagaaaaggtacccaaaacaggtaaaactgtatacatttactgatgtccagctctactgccattgaccttggtcccagccaggaatgttgagcgagtggccaagcaggatgaaagcatgctgtgtgggcttagcatgccatctcccccgatggaaaattacctatagaaagcaccttctggcccaatcttacatgtttatttccatccttgataaaaaataccgagggctctaatcatctatggggagctcaacatcaccaacttgcacccaactctgtggggaggtagaacctcccaggacagacggaggatccgtctgtgggtttgcatccaagtgggactttaaatattccctccacaaccaatttatccatgtctaccacaagccaagaagcgcttcacatccgccagattctctctgagaatctcagatcctaaacattcctacttagtcctggcactcagccaagcatctcaactgacggaatcagaggcgccagaccaagcataggtgtgttccagggccagattctcacacagccctggccacctgccttgaacctcgcccaaggcgaatcccaggagggtcctctgcttgagctgaaaaacaaactgaactccctcaagacagctgatacgaaagagtaacttccaagtactccaaacctcattaaatcttagtttccattacaagctgtttgtgccagtaggtcaaacacaccaaaccttaaagtcctttaaattcacgagtgctgatgatagtcctctcagcagaagtgtattttttgtgtgagagcagtgtaacatgttgattctcagctttctatttactcaacattctgactgcaatgtgacagacacgggctattcaccaagactgaagctcagccaccgcttcaagcatttcacccggagggaggaagggcgcacggatacacttgaaaaccacacagcacagcccaagcatctgagtcggtacaggagctacacccaggacgtccccaggagaggcagcaggcagggagaaagatcctctagcagcttgggatggagagccagcctcctggagatggctgtctgggctaagactcacgaatgagtgcaaggaaggagcaaatgtcccaggcagaagaaacagaaaatgccagaacagaggcagcaaagtgtatgtgagtcccagggggtggagcagctgcagagggagtggctggaaggcaagaggggtccctacagggacaggctgtgctcagaaggcaggacttggagaacgcgggacaaaggcgcttcagcaccagaggacaatgtgacttgaattctggaaagatcagcctttcaaaaatgtttagtttctttttcctttttagagggaaggcagaaaatgttaaaaaaataaataaataaataaagctgctttcatttcactatttttatgcttgcctctattttctttcaatctctgcaacagtacaactattttcttaaaagtttcaatacgcttgtaaatgaataacatgcagtcatacatttattcacagaaaaattccataccaaccacaagatttttcataaaaaccatgactgtcattgttactaatcaacagtctcccgccaccaaaaaagcacattttcaaaagtttctgtccatgagctcaactttttaaaaaatacaggtcaagcatccctaattgaaaaatccaaaatccaaaatactccaaaatctgaaacttactgagcacccacatgacgccacacctggaaaattccacatgtaagtacttaccacagacttattttcaagcacaaaaatactgcataaaattaccttcaggctatgtgtataaggtacgtaggaaacataaattctaacaatacattagacttgggttccatcttcaacctatctcattatatatacaaaaatatcccaaagtccagaaaaatccaaaatacttgtgtggtcccaagtattttggataaaggatgctcaacctgtaataacaacaggttgctattaaatcactctaaagtgatgtgcttggggacagaagccagaggccccaataatcaacctgtaatcaagccaatacccgcagcttttacttccccagcccatacacacatgcaacacacaattttgttctcctgattgtggtgctgcacgtcattcaatctcacattcttacctatccttcaatgaaattacatgctgcgtttttaagtaaacaggaaaaatccaagcagcaatagtgggacacctgggaaagttccctgggtgtaaaactgcttggtggataaaacatattggtgattccattcatctttacggagcagctagtatgggccgggcccaggactttagagtttccctctcatcatcctgtttaatacttacattaaccctgccagggaatattccacttgagataatggggctccgtagggttggtgtacccaaggttaaatggcctgtaaacctaagtcaccaaacccaatacaaagctcccctatacccaaggttaaatggcttgtaaacctaagtcaccaaacccaatccaaagctcccctacaggctgagaggagagctatgagggaggtgggaacagtgagcaaaggggctccagcacctccttgccctcacttttgcccttcactctctccttccccttttggtcactcagcaacctttatttagaatgaaatgctaaggaattatccatccaaacctcatctaaggttgctcaggtcatcctcctagaactacttgttaccctgactcttagctaaacaccacagtccttcctactgcacgaagtctcagggtcttgccctggcattctgtcctcctcagtttgatcctgaccccctgggctgaatgcctgaatcgcctttgtccatactgccttcctggaatgccctccctttcacttatcagaatcgtagcagacattctgcagattcacacacctagaccccaactgcagacctcagacccagagcccatctgcccctgcaggcaggtgcctcacccagttagcaagcactgccctatatcaaggtcagccttcccaccaaccaagcccagttcaaatcctagtgactaaatgagactcccacacacaccccataatgatagcacccacctccaaaatccagaagcgattactgactgtatcacagtggtgccaattaatgctaccacctcctgttatttatactgttatatattcttcctgtctcctagattatacttttttttgaaaattgcacgaattcagtcttatatttttttcatagagcatgactttttatacacagcagcccttcaaccaaccccacacagcgctgcagctcagcaccatgtccacctggaatcacgcgtgtcaggtcgcaagcgcagaagaacagatgcagacacggtccatcctcccatcctgcgccctcatgagaacggtccatgtaacgcggttcccaatgtctagcaccgcactgtcctcagcgaggctcctaatgcagatgggtggatgaggatgaacagctattcccaaccatcagtgatcacaaccacaaaaccatctttcaggagaggaaaaaagaaatgtcacacatgactaagcataagccttcaaatatctactcactgaggacatgtctagtattaaatcatgacacttcactatccagaaaaattgatttgtgtaatctgaagagaaaacagctcacatgcaatgccagaaaattagccccaccacaccagaaaatgtttactgcagagaaagccttggtgatttgagagttgggacctttctcttttcctttttattttttatttttggcttggttggttattatccaaagccataaacatgatctgcccacacttttccccaccagatgggagctcatcaagccacatgtcacctagcaacctaaacaccactccacaactatccagccacccaattcttcacacagaatttctcttgttctattaggcaatacggataaggaacagatagagaataaaagttaaaacagtgttaaatacatattaacacttcctcatcacttaatatagaatgggaaaagtagtaagaaagactaaaaattaatcttaatcattgtctagcaatttcagaagaaaaacgagaaaaaggagacctagaagacactccagctctggcaacatttaagggtcaacaatcttgggatccaatgactgaacttggtatactgcaaagcccccgttaaaattcacctacagaactctaagttgtacttaaagagcatgtaagtgttggaacccctgacccatctctgaccctccctctcatctccaactcccatgtcactatcaccctcccttccttcagctcataggccccttttctctttgtgacaccttcccagacacccttaaaaaactgcactcccttttctacgccctgtgaaacaaccactgctaatcgttaataaggaccaggtccgtgaccaaggccctgcactctagccacccagcatcccagaggccacctcttctccccatgtcatcaccagctccttcacctggaggaccccgcagcctcttgctcagcttctcacagccagtgggtcccttagatgtccagcacccagaacagtgccatggacacagtcaaagcttcagaatttctgtggaacgaatgcctggaacaactacatttgaactactgccaaacaggcagttcagcctatgtctattttgtgcaggatgaaacatgggacacagtaggtaaaacaattttaatcacataaaattagtaaagtgaaagaaaatgttgaccaccctcttcctattcaggagcctagacgtactgcagagtgcatattactttatttctctttccttgcacaatttgttttgttggtttccagagtgcctgaacaatttgagtactcttttggaacatttaaagcataaactgtcacacataaacaacacttaaaaatgctaaatgtccatttagatggttttctttccctttgtcagctttgcaagataaacaggtgcccaattcccactaattttatttgattttcaataaaagagttcaactgtaaggaacataacagagctactaaagccaacgtcttccatccttgtgtcgggtctccaaacgtcccccaaaattatctttaaaaggccaaatttatgctattttttccaatatatactaaaagcaaaacaaaagtctaaaaagcttttacttcttaatttctgagagaactgaagatgccaccggagtaccctgtgtacgctcaatagggctgaccaagccactttccaacgtcatttgcagcccccaagcccacaggggccaggccactgtcgggaacaaatgggaaatactgcacccaaacgaatgcgctccccaccaaagaggactctactacaaaggaaatatatccccgggtgcttgggagaaacttcagcgtgggctgttgtcaaacacagacacagtcggtaaaacaatttaacaaaacgccttttcacttctgacacacagtagaggaatgctgtgaagtggagacaatgttatcagtccaccaggaaaaagggaaatccactcaactcccaagtcaggcccggccccgcagcccagccacatggaaccagcccgggataggtaggagctgaggtcctcgcaggaaaacttttcattccgcgactcttccaaggttgtgctttccagagcccagcaagtgggatcagctcagtaaatgctcgcaagcgagtgccaagtgccagcggtggccctcccgggaacgcctccccgaccccaagccggcgactccccaaaccctgcagcccccggacgcgacgggccgcccctgccggcccctaccagcaggggacatggaggaaaagccccccgccgctgttccgcccccgcccgagtaagggagaggaggcagaaggctcgcaacccgcctctgtcggaagggcagtcacgaaactctcctcacaccaaaagttcccagtccccggcctgtgcccccggggcctgggagccgggaaaggcctggggctggatttcccggcctgcgccccccgcgcgctggctcggggcttggctgggtctgcagactccggggaggcgcccagggccggcctatgcgccgctgcccggctcgccccgcgctaccgaggccggagctcccgggcggagggtgagggcgggggccgcgggacccggctgggtgtcccagaggctgcgccccggcccgcgcagagaactttggcgcccgcagtccggggcggggggcgcccgcgaggcccgaccggccgcactttccctttccccgcctccctgcgcctctcctcccccttccaggaagcgccatattgatcccggcgccgtccccgccgccgccccctccccgcccgcgcccccggcccctcaccttggcgatggccttccggtagcgggtcaccgcctgctggatgaggctgaaaactttcatgtggccgtccccgcacggcacgaccacccgggtccgtccgaagcacacggtcactttcatgccgccgccgccgcgggcgggcccgcgcccctcgccgagcgcagccggagcagccgaggccgggaccgaggacgctgggcgcggaggagccgctggggactcgggcgcgcgggcggctaggggcgcgggcaggcggcggcgacgccggggggccgctcagctcgcatgcccggcccggccgccctcgcctcgcctcgcttcgcccggggcttgcctcgcctctccccgccgcggcgcccgcagcctccggccacctgttcggcgtcgcggcgcgctcgccggcggctgcccggggctgtgtggcgctggcgctcgctcggggccgctgggggaggggacggcgggaggggaggggaggggaggggaggggagggggaggagcagggcagggcacacaacaccgcgcacatgcggcagggggaggcgcggccggctacccgcgcggggcggagcgcaggaccgcagctcgcgcccccgccaccgccctcgggggccgacctccttccctccttccctccctccctccctccctccgggggcgcgggacccctcgccccagtgccagcacgggcaggcggccgtctgcccccaccagccctggcccaggcgccccccagcccccttcaccccgcccgcccagcaccctgcagggctgcgtcgcccctcctcggggacgccccttccacgcctccagaagtctccacggagccccccttcccctttctttgtcacttttaatcccattcctcgaactggagggttttgggtgcaggcgctcccggggaaagcagtttgtgctcagtgcggtgagtcccctcctcaccgccccggaggctccagcccgagcctctccgcccgcggggactcgagcctgcagcttgctcggctgggtttctgccctgcccgctccctagctctgctgcagggccggcagcggcagttctgcctgaaacgcaagaattaatagtctgctctggggagacagtggggaagccgtgagcgaccgggccttttccagaggccactatttaccttgaagtttcctgttgaccctctgctgacccacccgcttaaatagattagaacttaaacatcgcaattctgatacatttatttctttgaagttctgcagcataaggaatcctaacgcgaatccgtgaacagtctattccgacggcgcagagaaatctcacgcggggatccccacgatgtgccggcgcttaacgcagacgcccgaacccaggggaaggctgcgactccgcgatgagtgacatgcgggcttgagacgttctaaaggaacgtggaccgagttagggaacgtaactgaagctcattttgtcttagttatggactatgagtccttaataaatgtatgtcattatgtttaaagaatgacaaatgtctgcaaagagtggtccctgtcccaagccctttccagactatgtgaaattcttttttgccagttgtttccaagacacgtgaaagcaatcaagctcccctgggttggcgcagaacttgagcacttaagagctggaagagctggcgatcgaccatccatcccactccacctccaatcttaaaacaaggaaacaagacacgaggttcgtccgcttgccacactccctgcgctttgcagcaccgcagctgccccagcatagtgcagtttctcctaggaaacattgcccttcctctcctctcccagccctggaccaccactttccaccacctgtcccagcaaatcagtgcagtggtgttagccccatcttactccaggacattgacccagggccaaagtcacttgcccaaggcggcagagaaagctcaaggcag

SEQ ID NO: 428 - DNA, 1077370 bp, Homo sapiens
  source 1..1077370: mol_type = genomic DNA
gatcctcttggtttgccactgactttctatacatagaagacaaccaatatatacttactgaatgtatgaatgagctaaaatttatttttttaaaaaacctcttgaaacccatgaatttaatctcctctgcattatcataccatcctaggcaattcacgttcaatttaagtgtgtccacataggagcacatccttctgtagagaaacacatgatgcagccctgagggtcttgctggatgaactggatggctaagaaaactgcagggagagaccagagattgagctcagaagacctgagttcttttcaacagaactaacaccatggtctgctcagtctcttgacctctccgagcaccattcttgatgcacaagatgcgaagaataatatctacctaccgggtagttgttaagctcaaaggagctcatttacatgagagctaagaatgaaactaacgtaatttgttggtttcccccacatattcccatttcaattggtgatggatacacacctgccaaatcatgagcctaagggtgttaacttttttttttcctaataaaatgcacaacggtagtcgcattccagaaggctatgtgtcaacacacgcgatcatatctgggtcttgggtgtgacctttggccaaatactcagtgtcctcgagggtctgtaaaaggaaaagtttccactggcgcgttctctccaaggttcgcttcagctctgctatcccagggctcctgatggcagcggcacgggctgtgcttaaggcgagttcctaacaggccctcggggcactcctgcatctccgcacccggcagcctcgccccttgggtgtttttggtgggcgtgactagaagcacctgctcctgggctccttttgcatcttgctgcagtcccctcctgtgaagggcgcagctctgcagtctcctcgctcttccctcgggtgttctttctgagatccggtttcaatcctcgagcgtgtagccctcaggtccccttacaactccccagagctccgtgtgcatgcgtgcgagagggagagagccagggagagacccaggtgacgagacgaggctcccgggctccagttactggcccgcagggccggggcacgtcgtcgcccagcgtgcggcggggcccgggagcgccgcggcccctttaagagccgggcccaggccgtcgccgggaccgcaggagcccagagcgcgggcgccgcagaggagttgggagccggcgcaaaagtttcctcccaactctggccccgtgcgccgccgccgccgccgcccactccagcccccggcttggggccggccctgccaacgccgccagggccagggccagggccaggaccagcgacagggcagggccggcagtttcgctttggtgggcgcggagcagccgcctgggccgggcaggagtaggagcgggaggaggaggaggaggagccggtgccgcggagctgccgcgtcccgggccgccgggcacctgggaggtaacccctttccgcggccgcccctccccgattcccgccacctgccgcctggccaggtggaaggggcgctgccgcgagcctccgggcctcagggtgttccggggagcggcgccccgggtctctgggcccacccgccccgggcgtcctccgagagtgggggctgcgcccgcggggtcagacacctgttcggcccggcccggcgtggtcgccgggggccaggatgaaagtgaccgtgtgcttcggcaggacgggcatcgtggtgccctgcaaggagggccagctgcgcgtcggcgagctcacccagcaggcgctgcagcggtacctgaagacccgggagaaggtgagcgcggcgcggaggagtggggcgcggctgcagccaaggcacctgccaggtgcgacccggtggcgacactcaggggatgcagaaaacccaggggattatggggcactgcctgtagctgcagctgttgtctattgctaatatcagtgatgtgggtgtctttgggtgtttgtgggccttgagctccgagggtcgtgagtggacctgcagcattggaatctcttgggagcttcttagaactgcccaatatgggcagttctccaaacccaccgactcaggatctgctctttaacgagatccccaggtgattggaatgcccactgaagtttgagaaccactggtttagaacttgtttgagggaacgtcttaaaaggtgctgctcacctaagtgtgatttttgacccattaaggcccgcctcacttaggctccttggagttagaaagttgattgtgcaagtgacacatactcggaagttacaactgatggggcctttggagtttcagccttgtgagctgccctgtctcagtgacttgggcaggaacacaggtgggagcatgctgtttgcttagccaacctgtctacattttgagtgttttcagtttaatgtcacagattctatgaccatttactatgtgtgtgggctgttgtcaggtcctgagtgactattaaaatgagaaagacgttcctagctctgtagctgaagtcaggaacaagtataaattaagtgacaattttttttaagtgtgcaatacatgttgagaaaatatctggcactagaacttatgccaagtatttgggtaacattgggcctctgggacttcctcagtgaaacttttaaaggaaggcattgaataaccttttaattttttgaatcttcacatggaacattttgtatgtcccaaatgctcctcaaacagggcaagtcacaaattcttgttttagcggccaatggttctcttaatatttggtctcgtgccatgtgactaaaatagtgggttggtcaatctagtgatggaaaaacgtaagttttaatttcttttaacttcttatcggttatccaaagcataaaagtaattgtttcttacaagtgtatagcttaggggtttaagaaaatacttgcaccttctttgcctccatgaagaattattatacagaaaaaaaattcagctctggacagatacatgtgcatattgctttggatactcaagaactggaggagagtacaatgaaaggtctattaatatattaaatataacccctaaagatgaactctttactgatggaattgaggtggaggagggaaaaaattaaagtggtttataaagctgtgtgaaaatcaactgcaatgttatgtgtgtgtgtgcacgtgcatatgtgtttgccattgttaaaatagtgtttgctgtttaaatcatgtaattcagttaactgatgtttaaacaagtaaccaattgtctattaaatcatatttcactaacttttgaaagtgagctaagattaatagtaacaacattactccagacagattattgaaatagatctcattgagggattgtcttaccaaattgaagttactttttaactattaaataatttatgccctcaaatcttgtatatttagaagtttagtacagggggctatccaagtaagagataaactacaagcttgtaaataacatgaagagaactaaccagctgatatttaattcactataatttgatcttaaaaggtgttaaaatattgacattctggaatggaaacgtaacttataatatcacagaacaatgtagttgcattgatcagtttactattattaccagacttatatttttctgtttacatttatatattagtgaatgtgacatttaaaggtcacctgcagcatataaatccttcctcttattttcacttttaaaatttcattttaagaagtagtaggtgatgatttttcccctccccaagtattcttctcccatagttttattttaaataatattgtaatcataacaagatttaacgaatattaaatcgtattcataatggcactaaaaggtcaataaataccctaacaaattccatgcttttattcattttttttaaatgagaaaaggccagaaatgtcaaaattcaatttgaaaaacaatgtgtagtaaattcactttctgtaaatcagtgaatttctgcacttcgtaataataatcacactaacatgtaacatgtattgtgcttattctgtgcaggccctgttttaggaacttcatgcttatgacttatttctcccaacaaccttaggagataggtactattattatccccattttacaaatcaggggaaaaagagacacagagacatgacaagtaagtcgtagatttgggtttagaaaccaggaactgtgtctttagatgtttgctctcagccattaactgcatagcctagtactatgtatgttgttatgaattggaatttatccatattgtttgttttttaatgcttgatttaaaaagacatttccatctactaactgctatatcacatcaacctaaaaatagcaattttgcttctggaatagtgatgggatatccacaagtttctcttaattatatattttatgaggtctacatgtagaaaatctagtttctgaggcaaatattgtaggatttgcaaatcaactatgaaaaatattcctcagtctaactacaaatgggaaaatgggcaagatcttagacatccaggtggcgagtgctataaagaaccaaatttggtgggaacatgaatgtaaagtaagtccattattttctgaggcactgagtaatgtagatgggagaaagacaggtttcaagattgaggatgaagttgaggtttctaaagtttggaaagtaagtgaagtccaagaatgccattctatatttcgtggacagcgtctgagaagtaaccactacctgttgagaacaaagaaaacctatttgtggaatgttgggaaccccctgaatcaacatcagataaggccagaggttgatgcgatcctgaagatacagggggagcttttgggaaggctttaattatgctctgaagtctgggcctttgaggttcctgccaccatttgatgaactccattggaaacgtggtggactgagaggtgagaactgtgggattgcttatctccgaatcctgacactttatcagtgtcccagcctccaaatccaatttagtgaagttgttagtggagaagtgattgtcttcttatgtgcttatggtggggatcgttgagtaattagttaaatttatcatcaaaattatgtgtcacaggtgaatgggtaattgagctgtatcctgcagggactctcaaccctggctgaacttcagtaacctctaattttcacattaaacattttaaacattacaaatacctgtgtcccttcccccaagattctcattcattgggttaggagtgggtcctgggcataggtattttaaaaagcactccaggtgattctaatgcccagccaaggttgagaatcactaatctactctaatcttttcgtatggctgaactcattggattttaaactcttttgatggcagatactgtgtcttagatatctacacaccaatctgttattaagcaacagaataagcacaatacatgttatttgttaatgggattattattatgaagtgcagggcttaaaaccttgctgtctagggattcaaaccttttaagtgtctttcactgatttacagaaagtgaatttattacacattgtttttcaaaatgaattttgacatttctggccttttctcattaaaaaaaaacaaacaaataaaagcatggaatttgttagagtatttattgaccttttagtgccattaggaatactcctactcctacccttaaagaattcttcctatagaaggtgctcaaataattgcttaaagtgaacattcattttatatagacagttgtcccttagtatccataggggattgattccaggacttccctcggataccaaaatctgcagatgctcaagttcctgatataaaatgctgcagtgtttgcatgtaatctacacacatcctcctgtatactttaagtcatctctagattatttataatacctaatacaatgtaaaagctatttaaacagttgttatactatactgtttagggaatagtgacaagaaaattgtgtgtgtgtgttcagtacacgtagttttttttctaaatatttttgatctggggtttggttgaatccgcagatgcggaatgcatggatgcggagggctgactgtgtgtgtgtgtgtgtgtgtgtgtgtgtgtgtgtgtattcactgaggatgaagtgaataagggaaaggcttgtctagtaatgaggatgtatagtgtgttctggggttggaatgaatgagaaataagagcattgaattcgtggaatagcaggcatgctggaatttacaaaggccaatttgtggctctgactgcgtatgtgagtacacccttttttggaaaggaaaaattatatttgatagggttttcaagatgaatcttttctgtattcagatattttgaataatatgtttgttttacaagttgaggcagcttcccagaactgggagtagtctgattagactaacaattccattccctgattaactgtgggatcggaatctaagagaatttgtgtagttagaagaatctggtatgataatgtgtgggagtagcctggaggaataggctagaactcttgaatttctaaacttttcaggctttgatgccttgttacctaaatagattttaaggttcttgtatacataagctaggcccagactggattcctcaaatgcttttcaattgattgggcactgacttacttgagtgctttatttcctattcagacctcacttctttacagcatgtggacagaactgactcgccatcagcattacacatgcttccaacttggttttggttctgctactcagcttgcattgagcagcttctaagtttgcaaacagagggctcgtggggcctgctgtgacccacagacatatttttgtaggtctgctcagtgttatattttgacttagttgtcagcatttaaatattttgagatttcatgcaaaactccagattcctatcttctttgggggaaaagcaaattggaagctctgacaatgctgggctttactttcccacatagcaaccatcagttggagctgagacacctctgctctctttagaaagaattattaatgcttcagtctccattattgcttccctaacagtgaggataagttattgtcatcatgcttgactgtttttactctgtgcttattttctcacttatggccttaattcatggttgctatttggcctgctggtgggcatttgagtttgtgctcctggatcttctctcccctccctcctctttctctttctctccctctcacacacacatccccacacaccctctgtgtataatccatgcacatagggtttgctgaaccgggtttggctggttatctgagctgagttaattgccctgtgcgcgattgggagccacagccctgatttgtagcttgaggccctgtgcttaatcaagtggcttagttaaccaggaattcattcccagggtattctgtgctacagattccctttgaagaagttgggcaaatggtaatgttgtcagatttttgtgagactattttatgagtggactgttaaagacatctgaggagtgtgttaaacattcagagctttgggcctctcttggaaaatctaaagcagtgtagtgcagtagaactttctgggatgaagagatgttctagatctgcatctttcaagagggcagccactagacatatgtggttgttaagtagttgaaatgtgcctagtgcaactgaggaactgaattttaaattttaatttaaatgtaaatcgccacaaatggcttgccttagtggacagttcagatccaatgctcttctgatgggttctgtcagctgcttttggaaaccactggcttaaagaccagatcccaggcagtccttaacttgacattgctactcagttctgttgagaactttgccatcagaaagggatcttcagccactctttggtatccacaggtggtagagagagcctttaaaccttaaatgctccacctagacactagcacaaaaactagctgggtttgagagtaagcccaggttggcctcagtttacacctttggtgcaacaggctgaggatgtacatcctctgtctctggtactgggtggagagtgggccaagaaggagcagtgaacaaaaatctgggccatttttagtgagatttagatgcttctcgactgatagaaatactaaacaccttcagttcaattaagtcccagctatttatctttgcttttattgcatttgcttttgggttcttggtcatgaaatccttgcctaagccaatgtctagaagggtttttccaatgttatcttacagaatgttgtagtttcaggtcttagatttaaatccttgatccactttgagttgatttttgtgtaaggttgagaggtgaggatccagcttcattctcctacatgtggcttgccaattatcgcagcaccatttgttgaatagggtgtcctttccccacttaatgttttcgtttgctttgttgaaaatcagttgactgtaagtatttgggtttatttttgggttctctatttctgttccaatggtctatgggcctatttttatactagtaccgtgctgtttggtgactatggtcttatagtatagtttgaaatgagagcttttccatggcaaaaggaacagtcagcagtgtaaacagacaacccacagagtgggagaaaatctttgcaatctatacatctgacaaaggactaatatccagaatctacaatgaactcaaacaaattagcaagaaaaaaaccaaacaatcccatcaaaaagagggccaaggacatgaatagacaattctcaaaagaagatatagaaatggccaacaaacaagaaaaaaatgctcaacatcactaatgatcagggaagtgcaactcaaaatcacaatgtgataccacctcactcctgcaagaatggccatcatcaaaaaattttaaaaaaataggtgttggtgtggatgtggtgaacagtgaacacttctggttggaatgtaaactagtacaaccactatgaaaaatagtgtggaggttccttaaagaactaaaagtagaactaccatttgatccggcaatcccactactgggtatctacctagaggaaaataagtcattatatgaaaaagatacttgcacatgcatgtttagcagcacactttgcaactgcaaaagcgtggaaccaacccaaatgcccaccagtcaacgagtgggtaaagaatctgtggggtgtgtgtgtgtgtgtgtgtgtgtatatatatatatgtatatataaggctatatacatatatatgtatatatatggctatatacatatatatggatatatatttatatatatccatatatatatatatatatatatatatatatatatatatatatatacacacatatatataaaggaatacacctcagccattaaaagagagactgaattaatggcatttgcagcaacctggatgagattggagactattacggcaagtgaagtaactcaggaatggaaacccaaacattgtatgttctcactcataagtgggagttctcactgacacaaaggacttcagggactcagggagaaagggtgggaagggcatgagggataaaagaccacaaactgggtgccgtgcatactgctcaggtgatggatgcaccaaaatctcacaaatcaccactaaagaacttagtcatgtaatgaatcaccacctgttccccaataatttatggaaataaaaaaattttaaaaatactaaacatcttaagcacatgcttcctggaacctacactctcctgacttttttcctatctattgtccattctcaggctctttggttgttccttctttcctcctctacgtcttagcactacagtaccccaggactcaattcttaagtctccacctgtctctctctgcttacagtaatgtggttccaaataccactggggtagttccagcccaggtgtcttccctgaactgccagctctatatacggctttcttgaccctttgcctggacatctggtaggcatcttacacttatagcatgcccccaaatgaattcctaatccccaactccaaatcaagtcctcctacaatctaagcatgtcattaaatggcaaggccatctttctagctgttcaccagaaatgcttgtcatcacccttgaccaatgtttttctctcatgatccacatacagtcattctgcaaatctggttgactctgctctcatactagatttggaatctgactacttttcagtctctttcctgttagtatactggagcttgatttttattatttttttctttaaatagactttagtgtctccatttctgcccccgagactcccacattactgtctctccttaacacaaaagctagagtgataatttaaaattataatcaggtcatgtcattcttctactgaagatcttccaatggtgcacatctctcctaaatggccttggaagtgctacatgatctgactatctgtgcagaaaaagttaatgtagcaggcctgagactgctatccttagaaagccctgcttgcgaagcggggccttggctggtggcatctggaaagttagatttgtggagggctaccatcattcccttatcggaatggctcactgtgcaaaactgtttctgcaaacaatatggcttatgctgaacacctgctctttttctgggagtctggaatttttgtatatgctaagcagaaggtgcctatgtgatcagtctgcagtaaaaaccttgggtgcttagtcactaatgagtgttcctggtaggcaacatttcgcacatgtggtaagaactcactgctgggggaattaagcaagtcctctccactaagggaagacccttggaagcttgtgcctggtttcctgcagacttcgctctgaatgccagtttgttttgctgatttggctttgtatcttttcactaataaattatatccatgaagggcctggtacggtggctcacacctgtaatcctagcactttgggggctgaggtgggcgaatcacctgagctcaggagttcaagaccagcctgggcaacatggtgaaaccccgtctctactaaaaatacaaaaattagccagacgtggtggcacacacctgtaatcccagctacttgagaggccgaggcaggagaattgcatgaacctgggaggtggagattgcagtgagctgagagtgcatcactgcactccagcctgggcaacagagcaagatgccgtcttaaaaaaaatttatatccatgagtatgagtatatgctgagttccttgagatctcttggtgaatcatcgaacctggaaggtcttgaggactccagcaccctatatttgacctctctgacctcatcatctaccacacagctgtctgttctcctgtctcagtcacactgatcgcttgtcatgttattcaagcatgccagacagactcttacctagtgccgttttctctcttcctaaaatattttctctcagttatccacctatctgcttctttcatagtttccatcttaaataattgttttcttcttcaggaagccttcctaaccaccctatttatgattataaccttctgagaaccctttctattgcccttccctgatttacttctatctacagaccatattcttcctaccataccacttattttaactgtatttcttgtctccatcactagaatattaacttcaataaaggtagagatatttgtctcttttgttcatttctgaacccttagattctagaagagcaccaggtcatagtagggcatcagtaagttcttttcaaagaaataattattttaccatgcatccatcaccacctgttgcagctatctcttgttgtattacaaactatcaccaaaatgtagtagctgaaaataccactcaacaacatgattgtgtaggtcaggaatttggaccaagcacatgggggaagtctctgtgtgatgttttctaggtctgggatgctcaagatggcatcttcactcacatgtctagtgcctcagctagaatggctctactagctgtgaagataaagcagccactctcgggttttgatgagtttcatggcctcctggatgataaggcacacacgtgaataagccagttttgctttagtggtatgtttgcagggatacaatatagacaaataatgccctttgaaagagaagacactaaagccgttttgaaagatgatgaagaattttccacgagaaaagtgagataagacattctaggtggagggaaaaaagtggttgagggagttgtgaaaagttgagcgtagcctggagaggagtgggtgcacacactaatttggaccagatgctgatggtccttgggtgctgccctaagggattttcatgctgtcttaatgtagctctccattttgttacgaatatactcacattttgcttaatttgcatgagtttaaaaatatgtgtataaacttaaaatggagcattttcagaaaattggggaataaattacctaactttgtagtatgtctgttaaggcctcatcacttggttggttatgctggttttcacacattcccctgcaaaactgttttcaacaaaattatcaagatctagtagctaaaggccatggttaccttttacttcttgtttttgatgatgtcccaccttttaaaactctctactcatgggcttttcaggatttttttttttttgagacagagtctcacccaggggcttttcaggattcttaaacatctgtcttctttgagtcttcacagatgccctctctgccatcttcttgtatgttggtacactggggttctggcctcgtcctccatgggatctcattcaccacatggcttcacctacccgtaaatacacacttctagccctgaacttgctccagatcccaatatctgcctgcctctggacttcattacctggatgtcccacagacaattcaagcccactctattctctgtgaatctgcttgccccattccttgtagcctgttactgcgcacatggcaccatcattcacttggttgtctaatctagaaacctggatatccttcacacctccctcatattccaccacatgtccagtcgctcagaaatttcctttgatgctttgaagttatctctcttggatctgcttcctccttatcgtctctacatcccaagaacagagagtgagtcttctttattttcttatctctgtttttagcacagtatttgatatatagtgtagatactataaatgcttgctaaactttgtcaaattccacatttttaaaataaaaatgagaatgagcttgtagtcaacatggcgtttgtaagtttggagtctatatatggtagatatacatatttttaaatctaagtgcaacttttctcttgattatcttgaaatgccttatcatctccacatttgctgtaggcagtagtttagtggtccattatatctgccacactgattgtcttaaataacagtttcaaattctgacaggttgacttgcttcttagatttttcagactgagtgctctgtagttatggattttccatgaagcaacataatgtttttgcttcatgcaggtttgtgtgatgcagtctcttgtgtttgaataatgtttgattttcagcattcattaatttcatgttgattttaaaattatctggactacctcaattttgatggattctttatttttgacaggcatgatatctctgtcttaggagctactaaattgagcctgcctcctgttgctgaactctcgttttttggattgcaatgtggtggaattgcaggatatcaagacaggccggttaaaaaggttttctctcagtttagtctctatcagatgcagtgccaagtatcttccagataaatatgtcctgcattgctcttgtccgctgcctcaagttgaggatgttaaactctctgagttgtccctgtttgcagatgacatgattgtgtatttagaaaaccccattgtctcagctcaaaatctccataagctgataagcaacttcagcaaagtctcaggatacaaaatcagtgtgcaaaaatcataagcattcctatacaccaataacagacaaacagccaaatcatgagtgaactcccattcacaattgctaaaaagggaatataatacctaggaatcccacttacaagggatgtgaaggacctcttcaaggagaattacaaaacactgctcgacaaaataaaagaggacacaaacaagtggaagaacattccatgctcatggataggaagaatcaatatcgtgaaaatggccatattgcccaaggtaatttatagattcagtgccatccccatcaagctaccaatgactttcttcacagaactggaaaaaactactttaaagttcatgtggaaccaaaaagagcccttattgccaagtcaatcctaagcataaagaacaaagctggaggcatcatgctacctgacttcaaactatactacaaggctacagtaaccaaaacagtatggtaccggtaccaaaacagagatatagaccaatggaacggaacagaggcctcagaaataacaacacacatctataaccatctgatctttgacaaacctgacaaaaacaagaaatggggaaaggattccctatttaataaatggtgctgggaaaacaggctagtcagatatagaaagctgaaactggatcccttccttacaccttatacaaaaattaattcaagatggattaaagacttaaatgttagacctaaaaccatgaaaaccgtagaagaaaacctaggcaataccattcaggacataggcatgggcaaggacttcatgactaaaacaccaaaagcaatggcaacacaagccaaaattgacaaatgggatctaattaaactaaagagcttctgcacagcaaaagaaactaccatcagaatgaacaggcaacttacagaatgggagaaaatttttgaaatctacccatctgacaaagggctaatatccagaatctacaaagaacttaaacaaatttacaagaaaaaaacaaccccatcacaaagtgggcaaaggttatgaacagacacctctcaaaagaagacatttatgcagccaacagacacatgaaataatgcttgtcatcactgatcatcagagaaatgcaaattaaaaccacagtgagataccatctcacaccagttagaatggcatcattaaaaagtcaggaaacaacagatgctggagaggatgtggagaaataggaatgctattatgctgttggttggaatgtaaactaattaaaccattttggaagacagtgtggcaattcctcaaggatctagagctagaaatatcatttgacccagcagtcccattactgggtatatacccaaaggattataaatcatgctgctataaagacacatgcacacatatgtttatggcagcactattcacaatagcaaagacttgcaaccaacccaaatgtccatcaatgatagactgggttaagaagatgtagcacatatataccatggaatactatgcagctgtaaaaaagggtgagttcctattctttgcagggacatgaatgaagctggaaaccatcattctgagcaaactatcacaaagacagaaaaccaaacactccaggttctcactcataggtggaaactgaacaatgagaacacttggacacagggtggggaacatcaaacactggggcctgttgtggggtggggggtctggggagggatagcattgggagaaatacctaatgtaaatgacaggttgatggttgcagcagaccagcatggcatatgtatacctatgtaatgagcctgcatgttgtgcacatgtaccctagaacttaaaagtataatagtaaaatgtgccatgtaatcagtgaggtctcagtcagacttccaattaggggatcctgtgtgatgattgcctgtaacaatctgatcatctaaaagtcactttagtcacatggaggaagatttagacagtgactttgggtcagtattgtgttttttgctgaggatatagagtaaaataagacacagcttctgccaccagtgggcttatagatttaacaggcatagaggagcatggcaacaaatggcatggtatgatcaaggtgctttggggcaaggggaggtggggaagttgagcaggtttcactccatgagctgtacgtggccaggggtttgaaggatgcatggacagttgccagggaagtaggagtggaagatggggcaggacatgagggaggggtgggggcagcctaccgctgtttgaaggtaaacatgtatgttttgtttgaaggaggaggttggggagaagaggatagaattgtgggaagtttctccaggacagttgtgggacgggtagtagggaaggagtaagggtcaaagccagagttaaggaagcatttggggcaggatggagatattgttggacctaccttttttattgattgcgctagagagtggagatagagggagctgggactggaggtggaggaactggctcaggtcctgctgttggagtggaggttagatgtattgaagcagaagcagaaatgagctttgaggtttagggggcaaagtaattaggcttgggggttgactctcagtgggaagagaagtgtaggtggaactggggagagggcgcagtctctgagacatttcagtgaatatgcctgtgttctggccacccaggctggggttccgagataactaagacatggcctttgctttacagaacctgatagatagggataggagaggtgggagactgagaacagatgaaagggttggtgagcagtgtgagggcctggagcaatcagaaatcctgagttcgtaaagatgccaatcttttgcaccagttgttcagcattggattagagccttgattcaaggttgggattagagggcaggtgtgggaacaacctggtgctcagaaataaaagttgttaggctcagttaatgaaagtataaattgatatgggtggcttttagactttggtagtcacagtggctggaaatcttcctttgttcctccggacccgctcttgtcccttttccagtcccctctgtgacccaggaggctgagctgagtggactttcttgccctctggcttctagttagggtcggccattggggaagccccagtgagagaacaagagggtgggcagctccattcctgccaggtcactgtgggctggctgcttccctttcctaaagtccacagctctagccctatgtactcatctcccttgtattttttttttttttttttgagatggagttttgctcttgtcacccaggttggagtacagtggtgcgatcttggctcactgcaacctccgcctccagggttcaagtgattctcctgcctcagcctcccgagtagctgggattacaggtgcacgctaccacgcccggctaactttttgtatttttagtagagacggggtgttgccatgttgggcaggctggtcttgaactcctgacctcaggtgatccaccagcctcgggctcccaaagtgctgagattacaggcgtgagtcaccgcgcccggccatctcccctgtattaaggtcactcctttacctggcctgttgggtctcaaacaatggcaagggattgccgctgttaggaccattgtcccttgatggtttactgccaaagtttggactaataaagacagaaatatttgcctgcatgactcagtatctacatacacacacacatacaacaaacccccgtgccccacccccagcctgaaacaaaagtttcaggagagtacttacctttgctgtgaatgatgccctcagatttctaaattctattttgtttcactgaaaaagtagttggggtgtgctaaattgatttcactaatgggttagggcccatagtaaaaaaaccactggagcttcctgatgtttatggacacaggatggaccatcagatcaagtgactcagaaatcctcacagcgctaagatctgattgcttatagatttatccaaagtgtgaggctgaagttaagcttctaaaatgaacttaaactcctaaaatcaaatgacattgtaggtgttaataggtgaatttttctgtggattataatgccacgtaccttatatgtgtaatagagataatttttggatcttgagacttgtgtatggctagtgtgtgagctaagagtcatcctggcccagaagtcgctgtggctttataaaatcttcgagaaactgaaagagttttacttgtcatcttgtttttcttttgtcatgacatggtgatagtattggtaactttaaatattaggtctggattacttccttttgtagcaaagagatgaggaagtgtaagatggataaataatccttgcctctgtatttatagacacatttatagagattcagtgggcttgagttttgacagcagtgtttgatcagaaacattttcccagaaccttaaaaaaaaactgcagttcaaatatttctaataaaaaaaatttttttttttcgttgctgtaactagatttgcatttccgatttttctctctcttgtttcacttttgtctgtggctgaggaagggccacttgggaaatgcagctgtgggtcgtaaggagtccctcactctatcgctctgtgtttcctggggctgccatgacaatgtaccacaaactgggtggtttaaaacaagagaaatttattttctcacagttctaaagtctgtagattcaaatttaaggtgttggcagggccacgcttccttcaaaacctctagagaaggattctttcttgcttcttccagcttctggcagcccagggcatttctgagctatggcagcataactccaatctctgcctccgtttttacatgccgtcttcccgctgtctctctctctctctctctctctctctctctctctctctctctctctctttctctcttctccctttataaggacaccagtcatactggattagggtccaccctaatgacctcgtcttaatttgattccatctgtaaagactctgtttctaaataaggtcacattcataggtatgggtgggggggactgggatctcaacatactgtgttttggaggataacacacttcaacccataataatggcaatttgtttttaatgcattttttcttgcttttccactaagacacattgggggaattctgttgatttccccattgcctttcttacaatgttactctctttatttcttatatttttgctccaaaatagtccacatataataatcattctgtattattgagaattgaaggttattggtgtgattgacttatctactaccttctccatgtaaacattttggtatctgcttccttgttctcatttaccttttcagttgacacttttgagactcatgtatgtcctaaattctatctcatgtcacatcctttgtggtctgctttattttttattttttgagacggagtcttgctctgtcacccaggctagagtgcagtggcgctatgtcggctcactgccagatccacctcccgggttcacgccattctcctgcctcagcctcccgagtagctgggactacaggcacccgccaccatgcccggctaatttttttgtatttttagtggagacggggtttaaccgtgttagccaggatggtctcgatctcctgaccttgtgatctgcccacctcagcctcccaaagtgctgggattgcaggcgtgagccactgcgcccggccagtggtctgctttattaagcattgattgaagcccagtggctggtatggattacattgctattcagtctgtaattacgttcttttacaggtggcaggtggagtgttttggagcatgtgtcatgtcccccacgtagctcagttcctttccttcggggcttcacatgcatacattttgaaatgaagaaagccataagcaggtgccagatgagtttcctgggcactcagaaggaagagagcctgcagtaggctggaatggccaagtgggaaaatggacagaatttagacaaatgcagtagaggatgagggagagtgtatcatgtggcagagatgatggaagtacaagcattgtagtagttcttaatttgttgatcctaacacccctttgccctcatattttcttagaagacctgagggaacgtttcatgtgcgttatatctatatttatcatattataaatcaaaaatgagaaattaaaaaatatgttcaattgatttaaaataacaaagtgcccattacaagttaaaatacttatttttaggaaaaataactacaaaacaaaaaaaaatgtggtgagaaccatagcactatataccatttttttgcaaatctctttaatgtttggcttattagctggattctcaaatctgctttctcattcaatctgttgcaatgttgttttgatttaaatatatgaagaaaatcctgcctcatacagatatgtagttggaaagggagaagcattttaatagcttcgtcagataattgtagatatgctttttgtagatatactacatgaaaattcagtaagttatagtttctttttcttgcttaaaaatacatttattatatcacagtttctatgggttagcagtctgcacacagcttagctgggtccttttcttagactcaccaggctgcaatcaagatatcgcctaggctatgctctcatctggaggcttgactgggaagaatctgctccaagctaactcaggttgctagcagaacgctttccttgtttctgtaggattgaggggcctagcttttttctggctactagctagaggccaccttcagctcctggaggccacccttctttcctagaggtcacctgcagtttcttgtcatgtgggctttcttaacccaactgcttactttatccagccagcaaggagtctctagagcaagtcagctcgcaacacggagtattatataatacaacataatcatgggagtgacatttcaacatggtttcttaaaggttcattgcaatgttgaatttggaatcacaaccaatgaaatattcatactccattacaatgcattggttcatgtggtactttgactgatcttgtattcctgtgtgatttaataccatacattggtcatttggaaactattagttcactgagttgtatcagttttccaaacgttgacatatttcattatataatatcaaaaactacgcatattaacattactatcaatttcatcagaaacatctaagtattgagaagctatcaagctcacagtggtggatacaggtgttaaaaatttttaatttttggattatgattgacaacaaatgctgtcatctgttttccttcaagtgccgaggtgtacatcattcattctcaagaaatacctatcaaaatctcaagaataaatatccagagttcatctgccagtcattcccttcaagcaaaaatggtgcaccataaaaaaaccagttagttcagcctgcagctcagtcagtcaatcaatcagaggagtgcttttctctgaggtgaccactgtacttcagtatgcggcagaatgctttatgtgtacttcccatttccttacacacaatgtcaaaaacatgtgaaatcaaaggtcaagagataatgaaattttacctgcttcatcaagggcatgcttacattattttttaactaccaatgagtggcagtgaataatattaatacaatgactgctagtatagtttagtgtcactacctccattcaagctaaggcatcagtagtgccagtgttgaacatagttgtttcaaggataaaccatgagattccaaaagttattagacacattgactgtttaagcaccagtgtttattttcagaatttcacatttaaaaaaaatcttcaatcagcatcagcaccaattagtcattttataatccatttgtaaggcaaaggtacagctctgcagttgggatgtgaactcagtcgtcatgtttgtagacaaacctttcatttgaggagttactgtgtcattaggaaatggcactgccatgttttttttaaactaacttatccagcaggccttcagcaatgtcagtggtacaaagttttcttagtgtctcagttactgtgtgtttttctccagctaatgcagtatgataccctataaggtctttcagtggctttttctcttctctcttgaaaaactacaacaacgtttgtcttataaagttctcatcatgtctgcattaaaaaaaatcaattccttttcctttaaatccttagtgattattttcaaaatgatgttgcaactgaactatttgaaaatattctgttgcgtaagacatagtataaattactaaatatctataaagacaaggtaaagacaactttgttaatgtttttgtttatttataattttcctcagggttgttttgattttttttcttaagtagttgcttcccttccatggatcagaggcctctaatgtgtcagtttcatcttttttagtatctttaggcataaaaagtatgtatacctgtgggtaggaaagcaggctttctaaacctctttttttttttttttgagacggagtctcgctctgtttcccaggctagagtgtagtggtgcgatcttggctcactgcaacctccgcctcccaggttcaagtgactctcctgcctcagcttcccaagcagctgggattacaggtgcccaccaccacgcccagctaatttttgtatgtttagtagagacggggtttcatcatgttggccatgctggtcttgaactcccagcctcaggtgatctgcaaccccttagcctcccaaagtgctgggattacaggcttgagccactgtgcccaggctctaatcctcctcttttatgttggatttttttttcgttaaaacgtacataacataaaatgttccattttaagtgtatagttcagtagcattaagtatattcatattgttgtgcaactgtcgccaccacccacctacaaaacttgttcatcttcccaaactgaaactccatacccattaaataataactccctattccccactcccccaggctctgacaaccaccatttactttctgtctatgaatttgactactctagatacctcagaagtggaatcgtgcactatctgtccttttgtgactttattatttcatttagcgtaataatgtctttggttaattcatgttgtatcatgtttcagaatttccttccttatcaaggttaaagaatatttctttgtatgtatgtaccacattttgtttattcatttatccattgatggatgcttggttccttccacttttggttattgcaaatagtgccactgtgaacatgagtgtacaagtgtctgttctactctctgctttcactattttcgggtgtatacccagaagtagaattgctggattatatagtaattctatgttttattttttgaggaatccccctactgtcttccacaatgctgtatcattttacagtcccatcatcagtgagcaaaggtttcaatttcttcctatctctgccaacatttatttctgttttaatagccattctaatgggtgtgaagtgtctaatctcttttaaggcaacaatccatctttaaatataaaaagttagatatttattttagaatgatatagtaaattctaaattatagttttcatacaactaaaatatttagaataatttttgaaaagatttaaaatactattgtaaatctgtgaaatgacaaatcaaaagggcaaataaccttttagacttgagaaagagttttgactttgcagattttcaaaaaaggtattgggatacctaggggtttgtagaccatacctgaagaactgcttgatgaaatatagtattagaaacatggtctcagcttctcatgaaactctttccataggtggataaataatgatttcttttgatttacaaatttgtttactaagaacttaaaaaatgttttttcacattctacaacaaagattttatttaacaataacagaaaaagaaataacaaatcagttgccatggaattaaagttgggaaagaagaatgttttgttcttgactgggaaaccatttagaactggcaatagaaggcaggaataaattgtacttttctgacaataggaatgttttaagtctgttcttaatctttaaaaaaatttttttaagatcatttaaggagggtgtatgtatcagttttcaagttaagagatttctctgaagcagcaattacaacacttatttaaaatatttgaaatatgttgttagaataccaattaggtaattacaagaaattattgaaatttcattcaagaaaaaattacaggctggtttcggtggctgacacctgtaatcccagaactatgggaggcccaggtggatggatcacttggggtcaggagtttgagaccaacctggccaatatggtgaaaccctgtctctactaaaaatacaaaaattagccagatgtggtggtgtgtgcctttaatcccgactactcggggggctgaggtaggggaatcaattgaacctgggaggcagaggttgcagtgagctgagattgcgccactgccctccagcctgggtgacagagtgagactgtctcaggaaaaaaaaaaaaaaattgcaggaaaactcaggcatattattttgttttataacccaaatatatcattgctttaaatgacataccaaaacccatcagcatttaaataagcttatttctttttcttcccatcagccatctactgaatattgggagtgtggtgctgaaccgcagcctcacctgaggtcaggggaagactcagtttttttgctttcactgcacagtttgcatatttaaacattcttgaaaagaattgctctaaatatcactaattatctccatgcgtatagctcttatcttttatttttcatgaaaccaaaggttgtgatctctcatctttacaatatgacatctttttacttagatttagatgctatatgaaaccgtaatgcctctctttaagctccaattcagatagtagatttggatagcataaatgtttaatactgtatgtaaatgtccacatataggttgaaattataagatgtgtaacatagagtagtaatcatcaaataggtgacagatatccatgtggctattcattggggaatgtgactgtgaatcactgtattaaattcacctcctgcagtcatgggctaggcggtgtccattggtgctgcctagcattcttagttttggccattttgtttaggtagatagttgtctattaagcaagatacttactgtgtgttttgtaactaaaaattgtttgagagaaattttagatcttccctttggtttcaacattatgaagtatgaaattatgaatagtgctttagattgtcccatgcagttaatgatgaaaaccagttggagaaggtgatgagagcactctaagaaaactacttatttgtgcaaaaaagtggggagatgatgcttaatgtggggatgcttcattgcacattgggccacttgttgctatagtctcaaagatcatgatgttaaacatcatcaagatgatacaaaatcaaacctttctctgaacgtttgccatcctgtctcctgtttgggcctggaatattgagctgagattttgtaagtgtgtggcaaaatttataacggggctacaagacactcagagtaatggttccaatgactggaggtgtgtgtgctgatcattactgttggagtcaagatattggggcctcctttgtgaaggcaaggtctgaaagggaatgaaatttcatagatgaaggctacaaagtcacaaaatgtacagtaaagtatgaattcacatctgcaagggagagcttgttgtactctgagtgagccaagtcttgcttccagtgagtgtctggttcattcctcacataggcagcataggtgggaagtataaagaacttggctgtgtttatgaaagagacagctttaacttctcagtggggctggactgtagctcacctttagggttgatgttgggaagacaaataggctgctttgtgccgccttctgtattagcaaggcaaagaacagcttgacagtttctttgctcttctgacatgattctgtccatctagctggaatagggggctcaatttctgaggacaggtagctgagaatattgtggtttggggacctctcaaaaatacggagagtcttgtttgcctggataggagctctattccaaaggtgagggaaggaagtgataatgacttgttaaaagcaaccttttaggtagattgaccaggggcagagtttacaggatgaatgggaaatgagaaagagtgaagttcaaacaggtaagctgttgtaactgaggtgtataagctgttataactgaggtgtatgagctgttgtaactgaggtgtataagctgttgtaactgaggtgtataagctgttgtaactgaggtgtataagctgttgtaactgaggtgtataagctgttgcaactgaggtgtataagctgttgtaactgaggtgtataagctgttgcaactgaggtgtataagctgttgtaactgaggtgtataagctgttgtaactgaggtgtataagctgttgtaactgaggtgtataagctgttgcaactgaggtgtataagctgttgtaactgaggtgtataagctgttgtaactgaggtgtataagctgttataactgaggtgtgtaaatccggctgctgttagttctgatttctggatactttatttctactacttcaggcaatatttagagtagaaaatccactaacttgcattggctggcaaagaaggtgaaatagatccatgtggggttttgggaaaaacactgaacttggcatctggccctggggatagccctgactcttctatgaatatgaactagctctgaaaccgtgggcaaggcccttgaactctcaagacctcaggcatagagtagcttatctctaaagctcatccccagccataagagtgttttctagtgtcttatttattactttcaagtacacatttctaagtactaataacttttacatgctgccaaggagtggtcttttaggggcctattatgatgaagtatgatgaatagataactcatttgtaattaactgtgtgtatgtccatgcaaacaatttctgagctctaagtttctcataataattcccttcccataagtagggttaagcccttgaaattttgtttgcatttttaatttatacggaaaatgaatttttctgagatacctatatctcgtctccctaattagattgtaacctccttgaaagcattttgctttgttttgttgtttgctttttggttttaatccattataatgccttaaatagcactatgtgtattagggacttaatacagtagtagatgagtgaatgagaagttagagcataaactttagttcagaccaaattattgtgaactttgaaatattgtaacagaaattaataaagatgtaagtctatgatcttatattactgtccttaattaaataatgtgtgtgtgtaattattattgccgtggctacatgtaaatgtgacttaaaaggtcaatcacagtgaactgctacagaaaaaatggtaggagtggattcataaccgtgtaactttttttctctatactgaaaggaaatatcattttctccccaagatcagtctttgagtaactttgcggatctagaatagtgccttgcaattggggaagggagaaagggaaagtaaactgaagagttcagaagtgacagtggtcagttacatagagaacaaagtactttgttagttttctggccagatagaaaagaacacttttcttgactggagatgatttctgagatgaaagctttctaagatatggggtgcctggcctccacatctagtttctttgggagccagagacaagaggggataaaaagagaagcttgaaggaggaggaaaaggaggggagggtacatgtagtgggaatgaggggcagagtagcagacattattgcagaaaagtgggggaggaaagaaccaggctggaggggctccatagcctggaaggaagcagccctctccctacaccagtagctccctcaacctttgttctccttccacctagcatattaattgctgttcatgatgataaatctgaccactagttacagggaatggggctttttaacctatattttaggactttgcatcataagccaattaaaagagatgtctagttatttatcagaaatatttctataaatacagaagctgtgtatttttttcctgacaatatcttagttgtttggtcctttaaggaactgagcttagtaggtaaatactctagacagctgtgtaaattttgtaaataaaaatcagaaagctaactattcatttatgtagccagcattcattggctggcaaacgtgtcagaaactttgccagccaatggaaatacaataaagatactatgtagttcctaccctcttgtaggaagctataattctgtctgatggtgcacatcacttataaagcaccatgtctcagagaggctgctttggaaatgaccactctcttcttgggaaattgggatttcagaaggcctcctggaagagatgaaacttgacttctctgctatcttaaattattgactcaaatgtgatctgttagctaaagccacagagactgtgtgtcaacataggtgactgaggacagctcaacttggctggtggctataccattcaatccatctgctcttctcttgccaccctgagtccggctgtatctcaagtgtgatgctggagtgaaatgtaagaggcactctgaaattgacccaggtctctatactctgcagtctctatactgtccttctcataactagttttcactcttgatatcttttccactagaatgtaagcagatttgtgggcaagataaccatagcaatatggtagtggtgatggtgatgataatatgtaaaattcatggagcattactgaacaccagtatgtatgcgtgacctcatctgatgcctataggctctgcagctggtagtggggtggaggggctgtcattctctcctgacttagcagtgatgtcattgagacttaaagaggttagatgaccctcccatatcagtcagcagcaccaggagagagatggttacttgtcctttttttgtggatgtgtccatacaacttccctgccacatgcccagctaatacaggtttttgtttgtggtaagtaataagcgacagattctgctctgtagggtgagtaagttccatggtttctcctcgttgtgattggtataccatcagagtgtccccgatgcccttgggtactaaggcattgaaatacacatcactgtttgtccttctgccttgctcttctcctttcattttaccagcaaagactgttttcttttgtcagagtctacagctcagcactcctgcttagtttctgctcttgggcatcacctctgtcactgtggctcatccccaggccctttcagacactgatggcacctgctgagcccagggttaactactttctttactcctctttattcctctactgtcttatagcgtctccaagtatgtcttagcagccactgcaagaggttggccagctaggtaggcatttgttttgcttgacttgaccagtcactcactgtcagagcatcttcctatttgtggcctttcttctgggcttttccctcggtgggtgtgggagctcaagactgctactttgttctcagaggttgttgtttgtttagttattgtgtacagctgccaagttggagctgtttaagaaccatgatatcagaaagatgcttcattgcaatagtagctgttgattagaaacaaaacaatctattaatttcctaactttattatcatttatgttctatctccttctaaaagaaattatgacaaagttttcttttttaaatgaatcccaactagcagtgatctcatactttattcataataaattttgtttggatacatgtattttatatttttagctctctggttttgacagaatgactttcccctcctttgggcaatttgaatgttcttctattatgtagatacttaacatctgtgagaggttatagattcttgatttttacacgatggtctaagggagacatctcagtatggacaggcagcatagcgtgtttgtcatttgtgtgggctcttgagcaagattttctagattgaagtacaagctctgccatatactagttgtatgatcttaggcaacttacagtcactgtgcttctgttcttatctgtaagatggcgttgcagggttgctgtggaacgctaaatgaggtcacatttctgaactgcttatatggtgctggacacacactaacaatctaagtgtgtcttctgtatcatgtctgtgtttctcaagcagactttgagcaggtccagctatggtatctcttcccagtagctacatggggcccaacacatagtttctactcaggtttgtgagtagatacatgaatgtataaattaacagcatacgctttactaaatttccttagttaattgttttttatttaataagttgttcttccaagttccagttctctactcttcagatgactctgctttagttatgggttttttattgattcattataattactttgctgatgtttttttttctggctgtcatagcaagcagcagtcattagctacaagaagactcagcaatttagtaagaactgtcttggttttgagttgtctaccaaatataacttaacctaagacagtaatatacatggtttcattacaatctgtatattgttaaacatgcataatttctaaatttatgcaaacaaacattcattgctgtgtgtctcctaatgctgtacttgaaatgaatttgcttttggttttaaaggcattcatttaatggttggagtgaacctttaaaatattaattgcatcttgcttttaaaaatttagacattaagccactcccatgaaaactcaagttataaagaacctaagaattatttaaatagttcagaaaatatgatatgtaggcttcttttaattcatagcaatatgtaaattattgaccctctgaaaccccttgatgctaagaaagcagttctcgttttcctcttccattcgttgatacagctgaactggcattttctcttcccttttgtatagaatggacttaggctggaaatgcttttggatgatgtggtacttgcgtgtggtgtcatctctgctagagatgcaggcccctgcctgttctcctcctggctctctctggctgtggggctcaccagtgctgagacagctggagctgactggagtcagcactgtaatacactgttagaggttgaggataggtgtgcttggttgatttaacactttatttacctggtgagttcagcttttgtggtcttggatgattcctgtgctttgttcagtagaatcagtcttcactgtccccttagatataagcccctgtggagttccaaatctgttagtcctgtcctgtgatttggttgctcaggcggttcttgcccttgctatggggagccttgatacatggcttgtaggtcctgccatgttaattgactgttagtctaatatcgtatctctgtattgtaaggttttcaggttacaaacctcttatctcttccttctggggacccacttccccctaatctcccttattttagagttactgaagtagcaactagaaccttgcaataaatagctctctctgccttgacatcatctagcctttggtctgatttttgaatatttgatttggatatttgactctttttaaagttacacagtagcttgagggtgccctaaagagaactgcctctggccagcaggctggggtgctgctatttttgaagacaggccaccctaaccttgctacactagaagtttgtgcgcaagtaccctgggacacaaggtacatttgaatgtgtctctgtaatcaccagcaaaagaaggggagttggatctaagtttacttttcttatggcagtatctgttttgtaaatcaatgaatacccatacattgttgcggcaaagttttttttccagttaaaaatgataactcttctatctggtggttctcaacatgatgacagcatgcatgtgtgtgtgctctttttttcaattaacaataaaataactcctctaatgctgatgcaataggccggtggttctcaacctgacagcaggatgtgtgtgtgtgcacgcatgtaaatgaatatacatgcttgagtgtggttatattatataatggaatcaccagtgagacttttccacaataaacatgtctagtttctacccactcccacacatttggtttcccaggggtggtggcgagtgtttgagtcatctacaagttctcatctgcttccccttatggtgtctttcaggcacactcatgagagggttgtaatcatttgtcatggatcataacaacaatatggaatacaaccataataacatatactgagcaattactgtgaatccactgcacaatcagaaaccgtgccgtgtttttaatggatatttttctcttgcactaagctagggcattgacttcataattctaccatgatagtgtttgaatttgaaataaaacttgaaaaaaattatttttcttggggggggatgggatagttgggtttcgtaaattgatcagagtgtattgtttttaactctaccagagaaatcaaaataacttatttacatatctttgtactgcaggctagagctaacaaatatttataatattgtgtggcactattcatactacatggcagatgaggaaccttgggcatagaaagttaaatgatatgatgataggaatacctagtgtttaatgtgtgcttaatatgtgccaggcactttctaaacactttgcatatgttaatctatttaatcctcacaacaattccaggaaacatttactattatcattattattttgtaggtgggtaaactgagtcttagaggtttagtacctagcccatggtcacccagctggcaatcggcagagcccggttccaagcccagcctgtctggctcatgttgcacaattcccttggaataaaatggggatttgaactgggtcttctgcttcagtactttctcttagagctacattgccccggtttttaaagggttttctcacttttatttggttttaatttttttagagacaaggtcttgctttgtcactcaagctggagtgcaatggtgggatcatagctcaccgtaaccttgaacacctgggttcaaaggatattctcacttcagcctcctaaggagctgggactacagcatgtgccaccacacctggctaattttaaaaattgtttttttttcttttctttatgtttctcatgctggtctcaaactcctggcctcaagcagtcctcccaccttggcctcccaaaatgctgggattatagacatcagccactgtgcccagccagttttctcacttttaaatgatggtttgtaaagagtgatactttatttagatcagtggccctcgttgggggtggctttgtcccctaggacattgtgcaatgtctagagacaattttggttatcacagcaagtgagaaggtacttttggcatctgttagagtgaggccaaggatgccgctaaacatcttacaacgtagtggacagcactacccacagcaaagaagtgtcagcccaaatgtcggtagtacagaggctgagaaaccctgtttttagagtgttttgcatgatgcctttttctctaagaggaatcaatactttagtgtacagttctgcaagatatttttttaggctgaagagtaacaaggaagcagggtagagctgatactaaacttacatagggagcgtcttggctttgagactcttcatccatgactggattagttattttaaaaactctgcttgcgtggactcacaggatcacaaattccaaacttaaggacctttcatcttctggaatatagctgggcttgaggtattatatggagtgtgtgtctatgggcatcggtgtggtgaatacttctttgtatatatatattttttgtgtgtgttgtacaagagtgacttcataaaaggtggctcttgccagaattcagaacacagcaggtaatgtacttactgaagaggtaagagcatgagtaattcttgtctcatgagaaagatgtaaactagtttattataatgatgtaatatttgggtgcctgatttatcatccccatctccaatgatgcaaaaccttaagaactacacaggtgataaaaattcaaatggtgtctttgaagtccggcctattcccctgagcagttaaaagtgtcacctttgtcctgatacgttgctgtttgtggatgtttccggagatcacggttaaaatcttgaactatgcactctactatgggaagttttgggatgtttattccgtgagagaggtcataatctgggaagatgagagtcattcagctaatagggcaggaaaatatcacagtcaagctgtagacttgggatgatgggagtatggaagagatgattcctcctgtgtactgaggggaaccaggagagggagagttgtcaggaagcgtgtggtctttgaactggatctcgttttaggagaaacttgagttgtcccggttgagaaccagcttaggcaaaagtgtggccactttagggcaggctgggggcggggatatgaaaggaaatcatcatcatcatcatcatcatcatcatcatcacaacaacagtaataatcataatcatggccgccattttgtgagtactgctctgggaaggcacactctagaggttttaagatacactcatttaatccttgcagcaatctcatggggttggtattattatagctgttacagacaggaaatccagggtctagtaaggccagggtccggtccctcctgacagtactcttgtgcccctcgagcagcagtcccttctggttcattcttggtggttcccagggagcgcgaggaatgatgtcagcagagccgtgctgtgactggatgaacacaaccctgggaacaatgcctttggcacagctctttaaaaagaagtaagttggggcttcatctaaggaaactggctctgttctactcagtctcgtaggaattcttagaaatgttgtgacctggaaaattggagaggtatgatttgattaatttgcacatttaagtatgacagtgtaactagagagtaaacaaatggtaattatgccacaaagctttcctccaatggagagtcagggtcaaggcaatctggaatctttggcttttcagattagttgtgaacatggaacaacaagctcattcctcccctctacccagggtggacccctgtgtgggggatggggaagtagttttccttgcttggctacaatagcttagattaccatacactcatctctgacttagattttataccttcttttcccccatcctaccctgtgaagacaattgaaggctagggtttggttaggaaagtagcaagttaataatgtatcagaaagttgttggcagttgtgtttccttgaatgactcttctttgaagctacattgttacagtgatgtgtgtaatttgacctactgttcaaaaagaattcatttccatcccttccttgttcgttcattcatcatgcgtttatagaagccagtccttgacccagggggacccatagtctagactctggaggagagcacaaacatgggaaccagtaagtatagctgtggatgtgaaaagtaaagagacagaagtagagagcttccttctaaagagagaggggaaagagtgggaggcagcctttatttctaggggtactttctctctcttgttccatcctccgtcctggactgataccctccctgccctttgcatccatgttttttttccctcttatccagagtgagtctcctgggaaacccaggccttctttctgggagctcctctctcttcttcgtcactcatgcccagggtcacactggagcttcaccacctttttctgatactgataagtttcttcagctttgcattcttgcctcatttttctgtcatctgaccctagccgatcctatcacttgttatggaggtagctagaagcacgtgagatatggaaagtgttgtactggaaaatacacagcagatatacaaataactccacctgggcgagggagcattttcttaggctgggtatcaccttgggtttgaggtgcaccttctccctaggtgtcattttggagtccccgccttcttaaaaatgtgctatataagtattgtccacgtatgacctcattaattcattgaatatggcagaattgattgattgggatttggaagggctctataagagagactgtgatcttgtcaatctctctaataacaatctgcgtgacacatacaattaatcccttccttggaaaggagttgggggagtagaatcataaatttggaagcaaacatatcttttgttaaagtatatttttaaattacagtactcatctggaacacaggtgacatttctatcagcagaatttcaaatttatgcagactcgttattctgctttgaaaagctttatttcctttgctaactaccagatgggatattatagttatgaatccctaattctaatgaaatacaagccaatagatgtatcacactacgtttttcaaaccatagactattacaggcatgaagcacaagaagtctaacccattttaaactgattaatttaattaggagacaggtttggaggaacagaaaattgcttcttgttagttctctgagcactgcagttataagactgtatgctctgctctaacacaggtctgttctctctgaggtcatctaattctcctaaaaggggttttagatgctgagttgcatttgtaagtaaattctttattctttttctaccttctttcttttttattccatagtcattaaagccttgccgtgttcttgttatgaactgataaatgctttgtaattactctgtaactaaaaatgttaaacttgaatggttatatggattttttttttatttttttaaaaactcactggagaaaggaacagtgttgtgggggtataaaaagaattctgacagagaagagcagaaaacagaaactaggtgtggtgggggaggaatggcagaagtgccagggtctcttggtccatgtcttgagcatttactgtttgccagccacctttatgtgggttgaccatatataccataccagggcttgatatccctaaatcctcaaaaaactccatgaaattgctacctgttttcaggatgcaaaagctaaggcacaaaaatgttagttatcttgctcaaggttacacagctagtaaggtggagactaaatttgaatccaggtgggatgattgcatcctacaaagttcttgaccagagaactaatgtggggttggacccacccaagttccagtcctactctgctgcttcccaacaatgtgaccttgggtaaagttattttaacccctttgagacttttccccaatttgtaagtgggtttaaagcacagtataaggttgccgtgacttttaaatactgtgatgtgtattaatggtttggcatgcagaaggagcttggtgaacgttgcctttttgccctttcatgtcatgtcctggggaagtagcagtgacagcctgcagcctctgttcttctcgaatgttcccaaggtatgaggcacctctgagaactcccagagctctgcataggttgcttaaacgtacagcccactcaatgagataatttctaaggtttcttcttgcccttatctttagtgactccaaagtttaattttcataaattcatgtctacctagttacatcttgcaaagtgtaggactgcctttgcagttgatctgtcagtttgtgtgtgtgcacagctggaaaagtgtgttttccatgtagaatgagagaatttgcctggcactgtcatttatttttcttaaggaaagataaaagtttagttctttgatttctttcttgggattagttttttcttgactatcaagaaagaagggaaacaagtttgagtgaaaatagattgaggttcccccccctcatttcacactattaaaagagtgacacccaacttcttaggtttctcttccacagcacgggtgggttttgtagattaatgtatgctactgagatgttgagtcagggttggattagggaggagctcccctccttgcatttctcccactctgtcctttcagtccctcaaccagctaagttcatgcctgtagttggttagaagggaggttttctatacagcttgagagaaacatttaacagggtatcttcatgtttgtgtagatgtcatttgcttcattaaaagcaacagagtgactttttaatgattgccattctaactggtgtgagatggtatctcatagtggttttgatttgcatttctctgatggccagtgatgatgagcattttttcatgtattttttggctgcataaatgtcttcttttgagaagtgtctgttcatgtccttcgcccactttttgaaacaacaggtgctggagaggatgtggagaaataggaacacttttacactgttggtgggactgtaaactagttcaaccattgtggaagtcagtgtggcgattcctcagggatctagaactagaaataccatttgacccagccatcccattactgggtatatacccaaatgactataaatcatgctgctataaagacacatgcacacgtatgtttattgcggcattattcacaatagcaaagacttggaaccaacccaaatgtccaacaatgatagactggattaagaaaatgtggcacatatacaccatggaatactatgcagccataaaaaatgatgagttcatgtcctttgtagggacatggatgaaattggaaaccatcattctcagtaaactatctcaagaacaaaaaaccaaacaccgcatattctcactcataggtgggaattgaacaatgagatcacatggtcacaggaaggggaatatcacactgtggggactgtggtggggtggggggaggggggaggggtagcattgggagatatacctaatgctagatgacgagttagtgggtgcagcgcaccagcatggcacatgtatacatatgtaactaacctgcacaatgtgcacatgtaccctaaaacttaaagtataaaaaaaaaaaaaaaaaaaaaagcaacagagtgtatacctgtgacatttactaatgtgtgaggtgtctgaggaccacctgcgtgagaatcccctcgggttattacataaagagattcctggcccactacagacccacagaatcaaacttgtagtgtcattattttgtgatgtgaaaatattcttttcgtgtattgatcaaacctctgtttgagaagcaaccatgcaaacttatcacatcatttgaccttgttcagatcttggtgcacacattttcagggctaattttctcccactgcagcttgctgctgccagtgagggcctgcttgcccaagttcctggtgacctcactggtaggctgggctgggagtggttggtgacgttgccagggagactgaagttgggggcatgcagcctgtgaagccaggcaaggctggagccaggaatttgtagttcacagaattagatgcaagggtgaggtggtttgtgctcagaggagatgaatttaccaatcttagtgggcagaggagagaaatgggattcaaataactgaaaggagaggtagcaggagactccaatgtgatggggatggagatggggcaatagggccagaccttggatcaggtcttttcctcaaggtatttatggtatgacttgacagtctagctactgggaatttttgcggtaattgaatatttagacattgagtataatgcattatatgggttaagtgtatatattgcttatataagtaaagagtataattgaagatagctagtaacagctaagagtatagctagtaaaaacatactagaactaaaaataagctcatttctgaaaaatgcatcctttactaccctatacctactattttagaacattctagaaaatgtaagaatacacaagcatacgttcttacattctagtgcagtggtccccaaactttgctgcacaaaagggccatctgggtaataattttaaaaacataatgatgtctggcttctactcctagacattcttatttaaattctatgggatatgatgtggacattggggttttaaaagctctccagtccctcattttatagatgagaagattcaggactagcaagattgtgaatttttccaaggccacgtggtttaatagtggagaccggattgaataaagaaaggtcttctgactcttagctcagggcccagaaaccactgggccttccaaacaaagggaatttaagacagggcattgtcgacacaggtgatgcaagagttgaaaaggcaaactccaaatggtgaggaactcagagaccagcaacagcaggaagcaactgcatcatccgtagggttggagaaatgatgggagcaggtggtgtttctggatcccagagactggagcaaccttggagggagctaggaccaagatggtagtggaagactgtgtctgatgggagccaagactctagagggggctagagatgccacctgaagtgcatgtgttgggtggatacccttgcttctccctcttccctcttgttttcttgtcttccaccaatgcttcctattggcccagaccagttgggaagtgtggtttccttcaggacaatggaggcagcagacctgaaaacaacccagcagtaactagccctgtggtctttctaatgtactgaggtcttgtgattagagcagaactccatttggacactgtttctctttctttcttctttttctttcttttcttcagatcttgctctgttgcccaggctggagtgcagtggtgcaatcatagctcactgtaacctcgaactcctgggcctgaagtgatcttcccatctcagcctcctaagtagctgggactacaggtggatgccaccatgcctggctctttttttttttttttttaattttttgtggagacagggttcagctatattgtcctggctggtcccaaactcctggcctcaagtgattttccttccttggcctcccaaagtgctgggattacaggcatgagacaccacaccagtctaatgggcagataatttcttatattccttttcataagtggtgtgattgataggcttctaggttgctataatatacgtctgcacattttcattaataccttctttctgtgacgattcacctctctcccattcaacatgtttacatttttacattttttatacttaaaatatatatagttttaaaaatacgcattgtaatcttatctgtgctaaatcttaaacatttgttcctttgaagactagttacttcctagatatattgcctaaagccagatgatcctatgcatgcatatgagatgacagatcttactttactatatcatttaaaagcatttttaaagaaaaatggaattatagtacactgcattttatttgttctgcctgatgggccaagtgctttgcacccagtggagctgagccttgccagcctgctgttataacagtagctcccctgtagagctcagcattctttagacttggctaatgagtctgatgtcataaagggagctttattaaaataaatatggtaccatattttctttctaatggcattctgattaattccatcataaatgcatacctgacactcttttaattaattgagatagcaaagggattccagctagtgatattgaaagtgtagacggtgttttcaacagcatgttcctaccctgacaccagtatcagtgtttagtattactgtagatcagaatctgaagacctatgtctattttaacatatgtcactgaacggctgtgagagtaattaaagagtaatgcttgcccctgttttgaggatgtagctacttaaacactaagagattaaatgttgccgaaggctaccagcaagggagttgtggaggcagggttagaactggtttctaatttctagccttttgcttaaattgccaaccatgggtcccggtaatgtgttctgactttattttccttcagacttaatctgcggttaatgatagctttcacaatcagaaagaacatgtaggtctcgaatttatgacttccataaatctactactttccaacatacccacaaggatggtttggcagagacacagcttgtggtacacctattatcctttagttaattgggctgtttttactatttgggagatcctatattttaacatagtacgtgaaatattaatagtaaatatgaaatataaatttcaaactttaaacattttgtaccattacctaatttttaaaaatgcttatgactaaacctgctgaacatggcatgttcgaatgattattttacttctgtggtctattcctctcagaaacattgccgtccagaaaaatctaatgatttcttcttgtggaatagtggaatgctagataatggcacaaaaccagatccttcagactgtataaatgcaatgtaaaaatggagtggaaacattcagttttaggaagttagtgactcttcatgtcctgtaaaattgtgtgtatgcatgtatttttttttaaatgccaggaggtttgccaatgggactatagaggatatgccagtgagacagagaagatatgacttatacagacaagccagaatgctcattatcagagggatatttgtaggataaatcttatcttttacaggacgtaagaaagataaagaactattttatggtggttaattcagctcagattgctgcattatttaaaactgtgagggaatctttaaaaaaattcaattttctatttcccatctactttaattactttcagcgggattttattcattgtaggcaatgaattgtccacggataaatggaattgttggtagtcactttcactttggagctcttctataatcgaaatatgaagatatttgcattgctttatgaggacatttaaatacaagaagtaggtttttatatttcagattgaaagcaaagaaagctacctcactgattctaaattcactttgtaaaatctcgaattactgaaattaagttcattcagctcaaataagccaattgttttccctttgctccaagggagaagagcaggctctgtaccatcttgattggttttttatttgctcatcccctgatatgatttggctgtgtccccacccaaatctcatcctgaactatagttcccataatccccacatgtcatgggagggacccagtgggaggtaattgaatcatggcggtagttacctctatgctgtttttgtgatagtgaatgggttcttatgagatctgatggtttaataaggggttttcctcccactttgctctggacttcttgttgccaccatgtgaagaaggcctccccagccgtgctgaactgtgagtcaattaaacctctttcatttataaatgacccagtcttgggtgtgtctttattagcagcatgagaatgggctaatacatcccccttttgtaataccgtgagggagggcgtgcattagaattgtggtattccagtaggaaaatgaatacaccataacaagtcatggtatctgactttagaacacaaaccatttgtttctgatgttgatgtgcagactggcttccgtgacttggacttgcattctcttggtcatgtcagatttaagattcttttatgcagaacaagctaaacaatatcatggagttataggaacctatttattgtacatgtaatgagataaaggtggcctgtaataaaacagtgctttttaatattgaagatgctgaaactcctggagaagcaggtaacctgcgtatttaattcaaggactgaatcataagagctcatctttgggaaggagcttaccatcatttaatgctggatttttaccttgcttcctacagaaactattccccccactttgatatgcaaatatttccattgggcttttggtttcttttacagttttccaaggcactacatcattgtatttggtaatttcactttctttgtgtaattgttcctaatctttattctaaaatcttatcctacaatagttcaatgaaaggtgcttttctttttcttttaatgtttggaatactgcacttaatggagattcccatgtttactttaaaaatattcaaattttcagaaaaatgtattccccactttatccaaatgaagagtagtcactgcagaaatctttttattagaatcatagcattaacattggaaattatctacatcagttcccgttcaatgcagaagtctctaggcttagttttgtagagtacagagagggctaggcatctgtacttcaatctacaaatcctcttttcctcaacatccctcctaaaatgtggtttcaaggtggctatggccttggttttctttctttctcaagctcttcaggatgccacattaaaaaaaaattgacagatgtgataaaaattttgatgttaagacccgataaatatttttatagatgcctcaccagtgtgcttaagggacacccacggaaggtagactggtggaggcttaggacagtactgtctccctcaaggagctgtatatacctggaattatggcacatgctcacatggcatagttaggacagaacataagagatctgtgattaggtggcaaagcatataaaacaactactagaaaatggtcatgggaagggaggggacagtgttgagccttggcaaatagatattggagcaaatgatttgcaaggagactgatctgatggaacagtattcatgtttgaggctggtagtaataagatgggataaatcaaataggacaaagtcactaacaggcctcaaatgtcactgtgccgattttgaacttgacattgaagttactgggagccagtatggactttcgagcactggttgactaaacgaaggcagaacttttatctatttcacttgcttagaatgcctagcaatgtgaaaacagttaaatctagaagaccaaatatagctgttgcacaaggttctagaagaccaaatatagctattgcatgaggttctaggcactgagagcaagtttgacctgaagaggtccagctttggatggatggaccagaaaggaaaaaaatcaaaaggatttttggtaattggcaacgataaagaggttttgaatctaagataaccatgagttttggtgcaaatggcaaggacaatgttggtgccattgacaaaattaggggaattattttgtttcttatttcagcactgaaatatggaaatttaatttgcttttgagcaaatcaactttttggcacagtcccttgtttcaatacttaagaccaggcccagtgagcagatgggagatggggacttgcttctggagaattagagctttgagttctagtctgccattgatcgattacaatcaagcaaatcccttcctcccttgatatttcccacatatgaaatgggaaggataatgggtttctgcttagagggtgattgtattagtctgttctgactgctataacaaatatgccattattatcacaattctgaaggctgaaaagcttaagatcaaggtgggggcagacccagggtctggtgagggcttgcttccaggtttgcagatagccatcatctctctgtcctcacagggtggagagcagacaatgaggaaggtagctctctcctgtctcttttataagggcactaattccattatgagggccccatccttatgacttaattaccttcccaacgccctgcctcctaatacatcccatttgggatttgatttcaacatatgaattctggggaaacacagatgcgcagtttgtaacagtgattgtaaaggatgtgcaaagaaacgttggcaagaatgctgtgcaaatggacctgtctttatgcatactctcctttattgttgatgtgggtgttaaagcccatgaccagtcattaagaacccttactccactctcttctgggcatatggcaagtgagattctgactttaatggctgggatggggagaaaggagctgggaacatatgagaaggacctctttgtcttgtgtctgtttcagcagcaagagagaagacattgcttgcagccagaaggaaagggactgtctccaggaaaatgtagcctttagttagcagaacttactttagaaggactaggactcaggcttttaaataaagtgttgaagtctctgttcatctgcatgtgtgtgttgaaagaattagtcaaaatatctgaccttcactttttaggactgaatcaccattctttgctaaaaaccctgagtatggagtgataataacaagaatcaaaaggtgttttcaagttgtatatacaacatagatagggttttgttttaaagataggcagtgagactttttctgtattgtaattttcattagcattttgtaataaatttagtatctccagttggggttcaataacttaaaatgagaaaaattgcaattttaataataagcacaggttgattgcctactttgtcttttgtattaaaatgaatgttgcaattactgtgtattaatacccagcaaactatgtttctttttcatctggaactagaaagtattacttctaaacaggcacacacaatttatccttgtaaataaaataattctaagtgtgcatgtatatgtttattatgaagccatctttcagaatgcaccaaatggaaggagagaggagctgattgtcttttattgtggggctgacagaatgtttattaatggccatggatttgaaatgagcatcttactaaatggaagtctttggccaacctctgacccttttgtcttaaaggtttgagaacagataatacgaaagaataccagcttttttccagatggctgcatgcctgatgttcctttatgtttagctgtcattcaaatatgaatgcccagtgattataagtgtctctttctcttttctggactgaaatgaaaccttttatgcattgtgtgttaaaacagattaactgtttggctcatcagtagggaaattagaacaatagctgccaattcaatggtatagtagaagaatgtcctttggggccaggggctaaggttcataagcaaatggtatgtacaagtgtcagactggggaaggacagacaagttataaaaataattcgcctgaattttaattttataactgcgttggagtagtaatatcttttagaagcagggaggatttagataaatttttacgaacttttacatattttttagttgctccattaataatttcttggagtgctgttgtacacgatgaatttaaaatgatggatttatagataatgtgtcttatgaagacataatgcagaattactgtatgtttccttaactttttagtgtgctaaagttgtcttttaaatatatgtatttcataaggtagaataatggataatttgaatgtcatttttctaccaatactaacacttttgtaatctgaaatggaagtcaaggtggacagctatcatttaggtatggttgcaatgcagacctgcccggagggcaaggggaaaactggtgacccctcagtgacctttgtaggagatggctggaggccaaaggtctgaggggaccaaccgcatcaatttaggaaactagagtactttacaaaatgctagacaaactcacattgttagctctgagtagtaaggtggctgtcattttccatggaaatccatagaatgaggaaactacagtagtcttatgacctagtggacgaaaaagagcacatgtgagcttatttaacccctatgtaaagagattattttggtaacaagaggtactttttatgtattgtttatagaaaagcacaaaggaaagcctaccatgaaattctgttgttttaataacaattgtgttttctaaaacatccaaagatgaaaataggcttaaataaaataggcagctataccactttgtaaaacttattgtcatagtatatttttgatattttcacattttgttttgtattatactttttaaaatgattttatgcccagctaatttttataacagctttattggtgtataattcacatcctaaacaattcacccattaaaaaatgcagaaatcaatgacttttattatattctcagagtatttgcatccatcactacacagttttggaatgctctcatacattcttccccaaagaaaccccactcttcttaccagttatcccctattcccaccagcccttgacaattactagtctacttttggtacttttggtccctatgaagttgcccactctggacatttcatataaatggaattgtacaatcaatatgtggtcctttgtgattagcttctttcagttgaaatgttttcaaggttcaaccatgttgtagcatgtgtcagtatttattcccttttatggctgaataaattctattgtatggatatgccacattttgtttatgcattcatctattgggggacatttggattgtttccactatatttatacttttgttaattaagtgttttttccagtgaatatttatcttgtacacaatatgacttctattaggttttaagaggttaacatctatgtacgtttcatgtaagattatggtgactaccaaaagacaactgtggagtcaagggctactataacaggtcttgcacaaaatccaatcaaacaccatagacctctaggatctaagcatcctcaacgtagattgaggatctccagaatggaagaaatgcttatggttagcagtagagtggtgggtaggggagggggcttgcgcatggagcaatggcagatgagctacagtatcttgtaatatcctccacagtaccataccctgcctagcatgcagttggcattcagtaaatacttgttgtctgagcccattttgtgtaatgccacaccaatttaccatcttccaaggggcaaattttcgaatagtttgcaggctctcagctctcccaagactaactaatatcctgcaacttaaataagattgttatcttgataatgattatagttgcagagtactcagtagtttatgaatacttttatttggctctatttaattttctaggtaaatactgggtagaacagggagaaatctcatttgccagaaaactcaggagtcagaagtatcatttctattaaccagcaaagtcaaacttcactccaggtcctgcagctgcagaatttgtgcttttcttcaaatatcctgctacttacacacctctctacctctgcctttatcttgcttctcctctttttattaactacgaccagcatccactaagacttttgtggggacctctgagggttttagtgtgaaaacaaccttactgaaaatgtacactaaggagttccacagttgtgtcttgactgtttccttgaataaattctctgtcttacgtaccaatattaatagtgattatggcactccaagatgccacacagtggttccatcaacactcggtccctgaaacagaagtccagaactgaataaatgaaatggagtctatgattaaataattgcagtaaagcagatactgggtaaaaggagttggcaaggttatcttcattgatacttggagatgaggtcgaatgctagtgccaggcgatacaggactggactcctgaaagggcattgtgttgccctttcactcattactgagtgttcctgtgcatttcagtaaatataacatctatctataaaagcatctgttagcatgatgagaaacaggcaatgcctattccttttccacagagtttaccaacatactttctcacaataatagcaaagaattaagataatcatcactctaagtaggatgtgaaagaaatttagagaaggtgactagtgattatgcgtggagaacttgctgtattcaggaatgtacttttatctctatcttaacaggtgggcaagcaagggttaagtaattttgcccaagatcaaacgtctagaaaacagtggagccagactgtatccatgccatgaaactccagcattcttatttggcatcccagtgctcagctgccacctgcagttgaccgtaattgctaatcaccccttcttccctttgtcactgagtcctgtgactatgcttctgaagtgaaagtcatttttcttttttttctcacttcatacctctattggtggttattttattctctgaactataaaagtaatgcatatccactggagaaaaattcagaaaataacgtataacaaagaaattaaaaagtacttgaaattctgcagtgtaaatagcacagaattaaagacatatggaagcctcagctatgttggtgtttgtgaagtcgtttgatcaggtgcttttattcactttctttcacaattgctgtttctaagtgcaaaaatttcagtgatgcctccagtgatctgactagagaaatgtctgttccttagcatcatgggtctactttataaagtagaccctctctgagttgttagcaagtgtgatgttgttttgtagggtactcagatgctgtattagttcagaatatcctgtttgacccttggtgtacctgaattagaccatgaaggtttctttgtttctgtaggaaatttcactcagaatgtctgcttaagaagtcatcaccttcttctatggtctccaaaggagagcaaagtctactccatcctctgtcccatccactgccccttgccccactggctggactcgggcagtggaaacacttctctgtctaaaccattgacagtggacctcatgatgaggccaagcattgaagagattagaaattgagatggagtttggtcagggctttgacaaggatgggcaccataggaaatagtgtgtcccaggcagtggttgatggtttgactcttctccatcctgtttcttattgctgttccatcagtgctggtgacactgctgtctgtgtttgtagaatgctggtgatgaggaatgaggacagcattgaaagacgaagttgagtggggaagaaagaaacagtttaccaaagaatatcaagcattattagttgcttattaagaagtgggacatttctgtatgttagtcaattaaaaacagtcactttgtgaggtctttttatcactttggagctgaggaaatgaaaattcagaaaagtcaagtatgattttgtaaagctgcatgtataaaatgagcatgtactttaaatgtttcatttgttcatgctttgttttacgttttgtaataaattgagccttggtcaaagttgaaactcagaattttatttttaaaaggaaatgagagcatgctatgctattgggctcaatttgaattcttcagtgaaacaaagaagtagaattttattcattcattcagcaaacttctttttttgagcaactgattatttgcaggtgctatgctagatgctgcaagcaaaacatgtgctctgctatcatgcagcttgctgactgctgggtgtaaagacaattaagtaaaaacaatagagcactttaatgagtcttgtgatgattttttttgatagagaataagtttcataaacaattacatttagaattatgaaatcgtgagataaaggaatataatgtcctaggttattgtctaataaccatgatttcctccttttttgctttgaacaaactttttgtgaaaaatttcaaactcatacaaatagaatagattatgagccttccttaccccacaagtatccatcatccagctcttcaaatcattaaccactgatcaatgtggcttcattgtttttctttcatatttttttcctattttgttcctatttgtttttcttttgggagatgctggaagtcttggagcagggctttctgtgtaatagtggagccatactgaaaaattatttttcaaatttttgtatccttttttgaaacctgacttcagggttcaagggtgaatcctgctgctcttagagggaccttcttttgctgcctttagaggattgtttaccttgtagaaaagtatatgaagtgttggtttggaaaaagcaaacacacttgtcaggtgcaaaaacatagaacactcccaataatctttcatgtaagctaaacttggccaggcgcggtggctcatgcctgtaatcccagcactttgggaggccgaggcaggtggatcgcctgaggttgggagttccagaccagcctgaccaacatggagaaaccccgtctctactaaaaatacaaaattagctgggtgtggtggcacatgcatttactcaggaggctgaagcaggagaattgcttgaacccgggaggcagaggttgctgtgaggtgagatggcaccattgcactccagcctgggcaacaagagagaaactcactcactctctctctctctctctctctatctgtctctctctctctctctctatatatatattatatataatttttcatgtaagataaacctaagaaaaataactgcatggaacattcgtatttgtggtctctaaattgtgtaaaggcagcaatttcaggcttttaaggaatcaagctggctgcagaattgggtatgggaaattagcttgtctaactcattggcttgatttttgcggtgcccatgatctttgatgaggactttgtattccattgttctgtgtaatgcttccacaagtcatttctgcgaatggatgaatttttcttatgtggcaggagccgatgcgtgttttttttttggtagcgatcttaatgatgcccataggataaatgagaaattctcacaaatcctcactaataaatatggacacttaaaaagtctccaggtgtggatgctttgtgtttactgctgagagtgcccctgaaaatgctttttaaattttcttgcctgtccaggtaatgtgatgggaactacaggaagccagtttaagtgtcaatgtagcctagaatatggagaaaaggcaattgtttgcataatattctactgctaacatgtgtgaatgtgctttgcaaacttatttcagttcttgaacatctcagaagggctggggagcaggtgatgttgacccttttttactcttaagtaaatgctcttaagtgggccagtcaatagtgagctgggaccagaactcaagtcttctgttattagcatgtgttgctgtccagagtagagcctggtacattataggcacttggtaattgaatgaatgagtgaatgaatggaaatactccaagtcagctttttgcagaggatgcctttatagacccttggtattatgaagagatctttggaaacatgttttatggaaagataatttaggaaatatttgtctctggaagagtcactgaatatgtaaatatatcctgcatcaaagaaatcactgtacctttgtttagtccagtgtttaatgattatggtgccttcctatgtagcacatctattaatgtcccatagaattattgttatgtgtaagagcattttggaaacatagctccaaatgaatagctttctagaggggaatttgatattgaccagttaagactatcaaattaaaagttaaactcagattgtgaccttctgcttttgtctcatttactcctttgtttccatcctgaagttgcaactgtcatctctacgtagattatttggactttaccttttctatcttacctgtttcctgggtagttcttttatttgtgaatttaaaaaaagcaaactttattcttttaagaataatacatgttcaagttggaaaattagaaaatataacctggcaaaattaagagtataattctactcataatcccactatcagagataactgttatttatgtgctgttgtacatatcctttagaactcaagactacaggggtagtttatctgggttcaagtcccagctgtttctcctactggctgtgtaactttgggcaggatatttagcctatagcctcgatttcctcatctgtaatatggggataattatagtgcctatatgatagggccattatggggattaaatgaattaatatttataaaagattagaacaataccagacacatggaatttatatatgctaaattaaatgtgtatgtatgcaagtatgtatgtgtacaatattatattgcatgcatatatcacaaaattaagcagtaccccattgttctatattaacaatttgttttaaatttttcacagtaacaaacactctgtagtaaacattcattctccctgttttttacgtatccatcattatttccttaagtcaatttcttaatgggatctactagatcaatggatgtacatgtttttagaactttgatatagtctttctagagaacttggtaagagatcctgtcaatgctgctaatagctgtgtttgagaatgctgtctttttttcttttcatcaatatggaagataaaacatttttcccatttaaaagacattactaatgaagttaattgttgctctatggatagattttgccacttgtatttcctttttggttgttgctatttacagtttgaaaaaaaaaagacattgttttttctttttgcaagaaccctggtgatctttcgatacatacagtgaaggcacagtgatcagatcagggtaattagtatattcatcatcttaaaagtctatcatttctttttgttggaaacattcaatatcctcttttctagctatttgaaaatatatgttattgttaatcataatcattctacagtactttagaacactaggacttactcttcccatctagctattattttgcatcccttaacaaatttctccctacctcttttccccctacctatccctgcttctagtatcctctgttttactttttacttctatgagatcaccattttttagcttccaaatatgagtgagaacatgtagtgtttgactttctgttcctggcttatttcacttaacctggtatcctccaattcaatctcttttgcctagaatgacaggattttatccttttttatggcttaataatattccattgtgtatatatgccacattttctgtatcagttcatctttcattggactcctaggatgattccatatcttggttgttgtgaatagtgctagaatagacatgggggtgtaatatctctttgatacactgatttccttttctttggtaaatgcccaatagtgagattgctggatcatatggtagttctatttgtagtttctagaggaacctccatactgttctccacagtgactgtattagtttccatttccaccaacagtgtataagtgttcctgtttctctgcatcctcactagcatttttttttaatttttattttttgattatagccattctaactggggtgacatgatatctcattatggctttgatttgcatttccctcatgagtaggatgttaagcattttttcacatattttttggccatttatatgtgttcttttgaaaaatacctgttcagagcatttgctcatttttaaattggatttttttttgctattgagctctttgagttcctatttattttgaatattaatcccctgtcagattgcatgtattttctgccattctgtaggttgccttttttctctgattgtttcctttgctgtgcagaatcattttagtttgtatataatcccatttatttatgcttttgttgcttgtgcttttgaggtgttattcataaaatcctttttcaaaccaatgtcttaaagtgtttccactgtgttttcttctgttagtttcatagtttcatgtcttacattatgtaagacatttaatccattttgagttgatttttgtatagagagatgggagtctgttcttttttccttattgatacctagttttcctagcaccatttattgaagagattgttctttctttaatattctttgcacctttgtcaaacatcaattagctgtacatacataggttaattgctggtttcactattccgttccattggtctgtgtgcctgcttttatgccagtaccacgatgttttggttactatagctttgtagtatattttgaagtctggtactgtgatgcctgcagctttgttctttttgtcatagggaaatttttaaatttttaaatgaagtttgcctagagaggaaaaatgtttttaatttccttttttatcctaaagtagaagtgataaggtttcagtttttaaaagtaacatctcattcacatttcatgcttttgtgatattgacctgtattctttccatcattgactagcctctctttcaactcatttacaaaatgagttatatagaatgtaatatatatacataatattaaatgattgtcatgtgtggacttactgagctagatagttgaatctttctgtccaactgtttagtttaaaataggattttttttttctgagtaaatctattatggatgaacttggggattttgtttgtcaacccattggacaagaatggagtggagaaatttctttcagggactgatcgttaagcacatttcctggatacggaccttaagacctgtattttaaaataatggaagtaaaatatctgatgcatggaatcttctcatgcatataacctcgttttctactccatttatttgataattgtttcatcatttcagattcaatttgtaatagcaatgaacactctttaatatttttctaataaggattagttggagaggttaatatggtcagaaatttaaagaagcccagagtcatcttaatgagtgtcaggtaattaacctacatgaatagattaaagaaatcaagcaggcacgctgatgggttttcctttcaagttcaaatttagaacatcatctttgcagtggttaggtcttacatgttagatggtgattgctatattgttttttaatatataaaaagcttaattgtgaaaccttattagaattcctcatcaaatttgcttaattgaagaatgattatggtatgtgatatgaattttgaatttttatatgcaaatgatatttttaaaataaataggcttcccaaaatgattttcttcatgaatcaagaaccagtgctttaatatgtagatctcttgttacaagaaaaacaatcaatgtagagcttaagcagttcgtgaactgctgaatttaggcgtaggaaacttggtgaaagtgattgtcactgttatcccaggaatgctgttcaaatctaaatgaaaatttatgccagtggtcactgtaagactaaaaggcaagttctggaagtaatcttgagtagttcaaaggcaagatttcatctacattattcaaataggtagtttctcttcttaaggaattctaggcatttatagaaatttctcctttgtttaattacaatgaagttgatataagctgtttgtgtttctggcccctctgaaggtggtgtgcaggtagttgctatcctttcttttataattatggcgactttagacatggaagaggctaaaaccagagatcattgactttgatcctgtcattacagggagttatttctcatctagggtagatagccccatcttgaagaatgagacaaaatacaaatttggacctcagctctgtcacttgccatttactccttgagcctaaatattctgttttgcacaatggagccaaaagtctcatcaaatggacagaataaatgacatattgcttgtgcaaacactttgttgatctgctcaacaatacaagtatcagatgtttcattgttgctttccaaggaacttctctcctctcactcctaggtgtgtctcgtccaagatgtgctcattttatttgaccgtcttttaattttcagtctcttaattgagttctgttttccccaaccctgcccaaggactttcttaaacaatagtacaaagacacagtttaaaaaaaataaaaacagtttaaaaaaaaataaaaacaaaactgttgagttcaagaggaggcaaaatgttattatttctacacacaccattcctaatctgtggttagtaaaatgtcagtttaggtcagagccttgtactttaatctgcattatggcccgttacctttttccattgtcacagactgtatccccaactctcattaatgagggtccctatttaaaagagagatcaaatcaacccttattgtgtaaagggctctgtgttgattgttggtgggggtgggtgagatacaaatataacgtacagaccatccttatacctcttatcatggttagaagatggcatattgtgtaagccagttgttgatactctaagtgtctcccgaccactcatttggtcgtttggattttataaaatgtattctatttctccagctgtgtttgtgatggataaggagctatctttatgccactctatattgccatattgaccaacacaattgtttccttagcagatactcaatgaatgctttgaatcaagctgtagaatcagaataattgaaataaaccccttgttacttttagaaaaacaattcacaagactgatattactgatgctaggtgataatatcctatgaaactctaaagagggtccataaaagagccttcctgctcagcacaggaatgaggaagggtagatagatggaacgttctttaagtctgaaaagttaaaggtactgaatccttatcacataacctgaggcatctaatttaattttcttttatgccttttttactcctattttattaaatttgcagtctgtcaacctctttgagaattttcttaatttttctggatctgacttcctaataacacgttttgtattagaaagactttattttagctgcagttgaagtaatttgtaggtcatgattaattcaccagtattatttcaggaatcctcatacaaactgtttcagtggttattgtttgttcatttctctactggggcaagttaagtactgagaagtaaagtaatccacaaagtcagtggaaattgtttggatctctgaggactatcaggaacagataatgaaaacattgaaaacattctactttaatactacttttttttttaaagatcataacataggacatttttgtcgtccttataatcatttgttacaaaaacataagaccttaatgtctgttaactacaccttgatttaaaaactccactttacagaccacacttgatcactccagcacaattgtatttggcaaaggggactcacagggggcacaaaaagaatatgaaactaggcttgtaaacccaacagaaccattggaagaatgcttcaaagttggaggagtgcttcatgtttgtgtgaaagatctgtgtttattttctggctaaattcccactttaggagacaactttacacctttccaggataatcccgcctgggcacaaactgaagtgatattatctggttcatccagctttctctttctaaatccttgggtaattttgttttatcagattcataactccctggcacatagtaggtcctacctgctgggtgagtaataaatatttgttgaagggttttggtcatttctgttcacacttgaataatatgtgatgaggctgagaagacaactgtggaggcgattacatttgtcattagtgacctcgtttctagtccctgaatgttaactgttttcagagggaatacttctcttataggaaataaaacagtctactctcctgtgcctttgacatcctgagtgcttttcctcaccactgagaattggacagtgaccatgctttgttagagaaggaagggtgaggggttattcatgttctgtacattccattctggaattcttggtatcagaaaaaaggttttattattagctcagtaagaaaatacaatctgcagtctgtgtggtggtaagtgtcctggcataaaagctaagcttttaaaaatttatgtttcccctttaaatgctgttttaacatccagtctttccaatggacatttttagagcacagatatctgctcctgaaagtcatatgttttaaactgtttcctgaaacacgctgagattaaaaaaatttatgtaggttttgaacttctaaaatgactgagtatttaaactttaatgtaagaagcacctgcatggtaggatttgctgaaaatgctggtcttgagccatatgcacagattctaattccttcagggtgagtggaggggctgaggatcctgagtgattttgatatagtagattgatatttagagttcctttaataaacagtgcattccagccttctactccagcatagcaaactatcttaaaatgtattgccttaacatatttattttatgatatctcttgggcttgtgggtcaggaatttggatggggtattcttctgttccacacagtgtcaactggagtcacttagtgatattcatctggtgccttgtctggagggtctacagtggcttaactcacatgcctggccccttggtagggatgactggaaggctgggcccagctgggaccctctttgtgtagtgctgggaatttttgacaaagcctcttagcaaggtatttgtactactttacaaggtaactctgggctcttaggatatggccagacagagtgcttcaagagagccaagcagagctgcaaggcttcttgtgacctggtgtcagaaatgccagtccatcgtttctgccacaatctgttgatcaagtaagtccgaaagaaggccccaattcaaggagaggggaattagactttccatgccaatgagaggagtagcaaagaactcacagccatctttaaactctcacacactaataggcagaaggcacattgctatgaccatgtcataaatttctgaattattgattcatagtcattagttactatcttaatataagggctcattgtctttcacctgattagtttcagtgatttctaaaaggtatatccttctacataccagtctctttttactttgatccgttttatatatggcacaagtaatctttttgaggtgtgaatgctgatcatggaagtctttttcctaaaactgtacatgtgtctcatctcctattatggaagactgtttagacggtctaaggttctgtgatggaagtatagtgtagaggttaatatcatgaactctagagtgagactctctgggttcgtgtcttggttttgcgtgaccttgggcagtgcactctatctgcaccttgcttttgtcatccgtaaaaaagagaattataatgatatccacctcagtgggtgattataagagttaatgaagaggatatacaatgtcattagaatgtgctgggacagtaatggttgttttattattattgctgctaacattttatggcatagcattcaagacctgtcctgttctgttgtaccttgtattttcagtctcatttcctatggctattcttgtaatccatgctgcctcacccagttgtcttctgtgctgtctgcctgttttctgtctttccctttactcgtgctattgcttctcagtgaaaagggatcttctctccctctctccattgggacatgatattaccaagaagtgctttagagggttttcagtagatggaaactggaattttatatctcatttcactgtgacatgtggtcaggttttgtctctccaactccgatatatgcttcttgaggtcaatacctggatcagatttttgtctttgagtttgccacacatgtggcatagtgcagcgccttatgtattggtgtttaaaatcagttgtgttgagggtcaggaagggctagattatgctgcagtaagaatctggaaacctcagtggctttagtactttttagtactaagaggactacttttttagtactttagtttctcagtcatgcttttgtccatggtgagtcaataaggggatctgttgactgtatcagtcagggtccctggctgatgaaggctccatcttaaacatttttccatgatccagaagcatagaaaagagaagtagaaataaatgcactgacttttaaagcttctgcacagagagacccatgttacttctgctcacatttcgttggccacttacatggtcacactgaagttcttgtaggtggaaaagtgtgattctattatgtgctcagaataggagaatcaaccatttatgaagaagctccagtggctaccacagatgacgcactggtctcattacctattccggtaagattcttctaggttaatatgcccaaactgttttaaaggtttgacctgcatgcacctcattaagttaatggaattcaattcagttaagactactgagagtcctttatatctcgtttggaggctgctctgtccagggagagtaaaacaaaatcttaaagtagcagttttgtttgtgtgtgtggtttttctgggaaatattaaagccttgaacaatcccgtatctttttcatatatttacctttaaagaaagacattgttttcttgcacctgtcctccactttgattcttgctttaaagtacatactggttagcaagacttgagattgatacttatttctggcagcataccagaattaccactgagggactgcaaaatagaatccttggcatagtcactagggttctgagttctaccaagttaagcgtgtttaataatttaatgatcttagcaaaatggaaagatatcccataaatatatgataatattcagtgcctcaaagtttaagatggtatcccaaaggaaattataggggcagattatcatatagacgaatgattacatttacttaacaaaaaattgggaggatttctgttttataccgtaatccttatgaaggatcagtatagaactttgctttaaggagttctaagtagtttatacatctaggaaagtgcagtagacatgggctactatgggaatagctattagagaaggcaaatagaggatggcaagtaaaggaccttcgatcataattcactgaatatgttagctgagtaaggcttctgttaaacttgttaagttgccaacattacatggtttgactgggccttgtaaggactagaaagcagtgcacgtgtatctacttttcattttgagaattgtgtcaacaaatatgtagaggttaagaaaaggaagaaaattattttaaaaaaaaggattatacagtgggaacaaaggatttgggaatcaaggaaatgaaggatatgagggggatggctacactaaagatcagctgttctgagtgcccagagaactggagttaagggtgtagcctcacactccttcagggacctgtactaacagacttcgcgagagagggattcactgtaaataggttgcttagagttctgttccttgggagttttacagctgatctagatgactggaagaatagacctgttcatgtaaattgtaatcctgttaaagctatggcatttattaaggacttggacccctttgacaatttggacatttaggaaccctcagtctagaatgatgcccatgtgcacaccctgttgtgtttaaagtgttcaatgggacccttagtttagaatcctggcagcacaggcaaggagaagtttgcaagatggtttgcagccccagcagttagctactgcataaatatctgtgatgataaagagtggatgtattggtggcttcagacaggcaacaggggggaatttgtttttaattttaggcattttaaacagcacaggcttgtggatttaaaaaaatatttgcattaacacaacactaaatattgtaaggggcaaggaaagtttacagcaaagcacatttgcttggggagaaggtttctatggctctccactagctgttacatgtttatatcctccaaaactttcactctggcttttttcccgggaaagaaatatctgccctttcccattcttctacccttagtgtgtgtgggtggctgtgcatctccatggggaggacacggaataaagctgtgcagcatgctcctttgctcccagaatctcaagccaaaaggaattgttctgaattggctgggtcttattttctcagtgctatgcctggaaggagacaggatcagggtgtgatgtgtcctgaaagcataaactctttattagcacagataaatcagttggttggctcagtagatttttgggagtgttggtgacattcatttcacagggatctcaaattatccaggaattacccagacagtagattatgatgccctgactctggcaatatctgctgttactccccctcctccctgctcctgcatatgcatacaagacttctatgcttttgcagtgtgatgatattggggaagctgcaagggttttagtctttaagtttctcagagcaaaagaagaatggatacaatttactgtgttgtgggtgagagagaactgtgaaacctgatttaaaacaaaagtgtgggcctgtgtcttcaataatctgactttgtctccctgtagcataaataattccagttgtataattatggctattcaggtaataccctgttatattgctctggagttatactccttttaagatttgctagttaaaagttgtcactttattcagacttttgtttttaaagttaaattaaaatgttcttaaggtagtttattctccaggaggcaggattagcctttctcagtagatatttggatctatttggaaagttttgatttttaaaattaagtctttgagtgtatcaagttaaagcataatgtattctaacatcaacttattttttatgaatcccaaaatattttgctacatattctgcaattggaaaatggcatctcggaaggattaaagttccatatgctaaaggagacaccaaactctgtaaaatatttcaaaaggcttattctgagccaatatgagtgaccatggcctggggaacagtctcaagaggtcctgggaaggtgtgcccaaggtggtcaggttatagtttggttttatacattttagggagacagaaagtgtaagtaaaataataaattaatatatggaagatgtacattggtttagcctaaagaactgggatatcttgaagtagtcgggagtgggggttacaggtcatgggaggattcaaagcttttctagttgaaaattggttgaaagagttatgctttttctaaatgaagtcagtagtaagaaatgtttgagttaagataaggggagttatatagtccagtgttcttgctgtgtagatgaagcctccaggtagcatccttcagagagaatagatgataaatgtctctttttgaaccttaaaggtgtcagactctcatctaatctcttctagatgcaggaaagacctagaaagggtctttcctttaaataagagattaaatgagagacctggctgtattagcagacattctctacatatgcaaatttcccttaaaagagaaggctttatagggtcatttcaagatatgaaaaaatatatgtcaaataaatatatgttgaagtaagatattttgatttccttcagggtctacatgtgactctataccagagtcaggttggaacttggtgtcttattgccacaaagcgtctgttttttcagtcttatgatgccaatttcaatgttaatgctggccagttatgcctaaactcccagagagaagaggtttaaggaggtttgtcccacctcccttcccatcgtggctggaaattcagtttttcaggtttctctggagtccccttggccatgagggacatccattcagacagttggggggcttaggatttcatttttggtttacaagtagtactaaacaattattaaatctgttcttcttaatgtaatatggcaaatatttacaatgatttgttaagtagtctatcggcattattctgacttattgttcccttgtcctttttatggagtctccctctgttgcctaggctggagggcagtggcacggtcttggcttactgcaacctcgacctcccatgttaaagcgattctcctgcgtcagcctcccgagtggctgggattacagatgcacaccaccatgcccagctaatttttgtatttttagtagagactgggctttgccatcttggccagacatcttggtctcaaactcctgacctcaggtgatccacccgcattggcctcccaaagtgctgggattacaggcaggagccaccgtgcctgccccttgtccttcatagaaccactttgatatgttagtctacttcaggacaggtgcctcttctctctctagatagaaggagaaacatcatctccccacctctgagcaccctaagaacaaatacatggccagtggttccaatccatgttacagctgtccaacaattggaagtatttattatttacataacagtatttctagtatataaaattcagttgatatatgcttgatacaatttactcagatttttgaagattccaaagacattttacaatgtacactgaaaatgattgttcccaaactgcatttcctgcttttcgaaatcatttctctcataccatccctccagcagcggtcagagaattgagtagcacttttttttggcagaataattctatatccaggtcagtgagagttttcttgttcatactttgatgttttgtaaatacaaaacaaaattcttattctgatctcagtcctgttaggggagtggttagctcagcatgagtcctaatgtatcagagatgaagggaaattggttgggagactactcctgggaccaggtgagaagcagctagtgtcattccgaatgtgctacagaggaagaaatccttgtagccctctatggtacttacttagaaacatcctattaaaatttgctacatagttaaaactgacattttgacccctgtctaagaaagtggggaaacccttgtcatgaataatgctatgtacagcagcagattaggacttctaccttttatctcgctttcgactctaaggtagcattccattctctgtcactttggttaaaatgttactttggaaggcagaggtcatttggagattgtctcgtggtatgtaaataaaactaatataaaaagtctgttttaaagttatacgacctctcctgttcttcctcatctcctttataaggtttataacttgcagacttttagcatcagtaagattataatatgtaagatatatataaacaacgaaaggaagaaaatgggaaagcagtcccatattcttaatgttcttactatatacatgtatggactaattcggacaaagtctccaattattttaaaatatactgatccacttttaaaaatccatttgcgtacatcccatatctaaaagttgtgtagggtataggaacaacaacaactatataaatctatatctatatctatatatatgtgcaagcttgcaggatatcgcaaaaatgaattgagtggatctttgatggttaaggttgagtctgttcaaagcctattgacttttaaaccaggagtctcagactcagatcatttcaggagttagacaagtaactggtgaaatatgcatctgttgcattttagacagtgagaatttccttcatttctacacagatgtcatattgattattcttgaaatatgagatcttcttgatctgtcttctgtttcttatttataggagtatgtgcagagaaatacacactatttggtgtgagatgtgagatactaaatgttgtagacactgggatgtcccagctcagcagcagctggttgttgcctcgatgtagaatgcaggccaccagtggcccgacttttgcttttaccagatgagatggcagcctggttcttttgcagtttggcctgatttttaagcaacaggaacaacaacaaaccatatagcccaaggagtatagacctgtaggtggactgcatcagcctgcgggtgcccagtttgtgatctctggtgaaacgttagataggagactgtcttttcttcccagttatgtttagtttagaacaaaaattggatgggaaattctcaaaatttacaaatacatttctttgatcttcttagcttttcatagattggtttgctttgtcaacaaaaatttacaacttccaattttctttgcaattgtctgtgcatgtatatatctgtattttgttaatatgtatttataaagttaagtgtgtattcctcttattgatattttaaatattttaaatttattttaaactcactgaagtaagacatgtaaaactgcatgtattacaaggtttttaacaaatatcagcaatgccatgccccacccacccctccctactctttggaagcaaccactttcaacttgtgtttcttctcatttatcagcaatatgcttgagtgaatatttcttgatttttaatattaagaccttttcaggtgatctatgataaataatagtttagttcttttttattttttcttcccagttcccatccctcattctctcttcctatgcatcctgcttcattaattaaaaatgttggtgagatcagtattcagtttttgtattagtatgatgataaaatattgttgaaagctgagtcacacaggatacttgtacatgtattttttttctctttccctggttttataatggtttcattttgtttgtttagtgatatttctttaaatatatttcagacatgtctggtcaatttctgggaaaggattctcaggagatatattttttttgacatttatgtctgaaaatgtctattctttactcatgctttattacaaaggtttgaaattctaggttgaagtcattctctttcagaattttgaaggcagtatgctattattttcagttttcagtattattgttgagaaggccaccttttacctgccttgtacctccaagcctctgcattttccgcctccagttctttgaaatttcatgatgtctgtgggtttttaaaccatttattgtcctgtgcactttgagcatttattagagcctttcaatctgtagattttcagttttgggaaacattatttctttatccttcgcctattctcaagacacacagtttttcagttgttctctttctggttctgttattgcgttttggaccttctggagcactcttctaattttcttttttttggccacctattttccctttctttgtctttttgttgtattctctgtaacattttctaaggtttatcttaactttctattgactttaaattttgccatcaaaagttttatttttaagagctctttgttgctttatgaactttgttttattccttttaagcatagctattgtatgggtgcaatatttgttcatttctctgagggtataaaagtctttttgaagttttcttctgctgtttgccttattgatctttccttagggttatttattttttctttttatttatgttagtctcctctggcttttatggtacaggattcccacaaatgctgggtgaaccttacattgttcatatttgagtgagtctctagtctgtccttcgtgattggtggtggttttccctgtgaggtaattctgtgtcttgttgggccccttaaatgtctagatttataggtttggattttttttttaactgattcgtgtctctatagagcagcagttccttaaccattagtctcatgacctttttacacacttaaaaattgaggactttatagactagtactgtccaatagaaatataatgcaaatcaaaaatacaagctacatatgcaatttaaaagtttctagtagctacagtaagtttaaaaacgtaaagctgatatttcccaataaatccaaaatatttttaacatgtaactaatataaaaatcgagcaatattacatttttttatactgtctttaaaatccaatatatattttatacttagagtatatctcaattcagactaatcatatttcaagggttcaggggccacatgtgactagtcaccaccatgtggacagcccagctatggagcttctgtttatgtgagttatatctactaatatttactgtattggaaactaaaactgagatattacaaaaatagtcacttcattttaaaataatgccaaaactcacttcatgttaacacagtgatatggtctaggtctgtgtccccacccaaattttatgttgaattgtaatccccattgttggaggtggggcctgttgggggatatttaaatcatgggggcagtttctcatgagtggtttagtaccatcctcttggtgctgtcctggtgatagttctcacaagatctggttgtttaaaagtgtgtggtacctcctcattctctctctcttgctcctgctcctcctcccgcttcaccttctgccatgattggaagcttcctgaggttttcccagaagcagatgcttgtgttatgcttcctctatatcctgcagaaccatgagccaattaaaactctttctttataaattatgcaatctcaggtatttctttatagcaatgcaagaacggcctaatacacgcaaattactcacttttatgtgaggtaaatgtttttccaagacagaatttattaagagtggtgttttacatttttgcagatcttaatgtttgtcttaatgtagaagatagttagatcttcatatctgctttagcgttcaatctttttttaatatgttatttttcttttaagtatagaaagaaattctggccctcacaaacaggtagttggaaaagggatgaatattttcatagtcttttcagataattctggatgttctcctttgatactacaccaaaactcagcaattggtggtttcttaaaggttagttgcaatgcggaatctaaaatcatatcaatgcttttcctattctgtcacattaaaatccatttgtctgtcttgtcctttgaatgcctcttttatacatgaatgagtttgtaacttgttataacacacattggtcatttgaaaaacattggttgactgacttatgctaatcttccaaacgctgacacatctcattgtacagtattaaaatatcatatttgcttatcaccatcagtctcatcagaaaaatcagaaaaattgggaaattgtcaagctcagtgtggtgtatagtttatccaaaccccaacttctgcttgaaagtttgaattttacgttggcaatgagcactgtcagttgttatccttgaagcgacaggcttactgtgtttactttttagacagcgtctgccaaatacccaaatctgaataaccgtggtttctctgtcagtcagtttttgaagtgaaaatgctgttccatgaaaaaactactggttcagtttgacaatgaaaatagtgcatgcattttttttcctgaaggtaactctcatactttggaatgcagcagaagtgctttataggtacacttcattttatcacacagaatattgaaaagacatgtaatcaaaagttgagatttaataaagtaagttttactgcctcatcaagttcttgaagtcagctttttaaactacaggtattgacaaagcctaaaatggatagacctacatgtaccatgcacaactgtaaaactcttaggacataggagaaaacctagatgaccttgagtatggcaatgactttttaggtacaacaccaaaggcacagtacattaaagaaataattgattacctggattttcataaaactaagaatttctgttttgtgaaacacacggtggagagaatgagatgataagccaaagactggaagaacatatttgcaaaaggcacctgataaaaacgtgttatctaaaatatgcaaagaatatttttaactttccaataagaaaatgaaaaacccaattaagaaatgggccaaagacctgaacagacacctcaacaaagaggtacagatggtaaataagcacatgaaaagatgatccacatcatatgtcatcagggaaatgcaaattaaaacaacagtgagttactactgcacatctattagagtggccaagacccaggacactgacaacaccaaatgctattgagaacgtggagcaacaggaactcgttcattactggtgggaacgcaaaatgaaacagccactttggaagacagtttggcagtttttaaagaagctaaacataccctgactgtatgatccagcaattgtgctccctgatatttactcaaaggagttgaaaacttatgttcacacaaaaatctgcacatgtatatttatagcagctttactcataatggccaaaacttggaagcaaccaaggtgttcctcagtaggtgagagactgaataaatgatggtacatccagacaatggaatattattcagtgaatgggaagtcctgcgtgtagtggtgtgtgtctctttggactgagttgtgagggctgaactgaaagtggcaggaacatgccattttagcataatgctaacattacattagatttggccaatatgtcagtgtgcagtatgtgttaagttctttcgtcccttaaacttcattatctctgtccaaactatttttatttggactttatatacttctttccaaaccttttataaaatttctcctttaaaaacccatgccaaagttttttctctccacggccttccagatttctcaaatgttccaaatgttccatctcccttcccagggttcctcttttggaaagctgttgtgatattattcttccttctggaaagcttgcagagttaggggttacattaagtctggggtaaatttatacaggtaaatggtacaacctcaagccttctgtggaaatcagctggcctctcctgatgatactttaatctcatcttgattctttcaagcctcctttagcctgtgactgtagatgaacttaaatcacagaagtgactatgaccctttactttgcctaacaattcttctttcttctagacatagttgaaatgccatcttttttctgttgctttcccaggtaaaaatcagtcttgcagggcagactaggtctttttggggagatggacagacccaatttgcatatccacataagccaagccaaggcaactagcatgaatgtacaagcatgtggaatgctttccaacatttttttttctttttttaaactttccaacttttagtttaggttcaaggggtacatgtgcaggtttgttacatgggtaaattgtgtgttgcaggggtttggtgtacagacaattttgtcacccaagtaaccagtgtaacactcaagaggtaactcccactctccaccctcaaggaggccctgatgtctgctgttcccttctttgtgtccatgtgtactcaatgttcagcttccacttataagtgacagtatgcagtatttggttttctgttcctgtgttaagttgcttaggataatggcctccagctccattcacgttgttgcaaaggacatgatctcattctttttctggctgcacagtattctgtgatgtatatgtaccacatttcctttagccagtccactgttgataggcatctaggttgattccatgtctttgtgattgtgaatagtgctatgatgaacatacacgtgcatgagtctttatggcagagcaatttctatttccaacatttttaaccatgtaattgtgctttctccaaagttatttcttccaatgcccatggacagtggagagaacgttttcttgtttattgtctctttttgcaaaaacatttcttatctgaactgctgctcttcttactgggccatgtttatgtcctagaattttcacccgggatcacaaactagcatatagagggaacagtgtgccctgaatagtgctgtggcatggagtgtgtgcagtggaaagggcacagacccttggatcacaaagacctggattggaaacccatatctgccatgtaccactggagggacctctgactagtaatttcagtctcagcttctacatgtataaaattatattttattgggttatagtgatgatttaggtcaatgagttaatatggataaagtgctattcagagtggttggaacactgtgatcacactcttagtggacatgtccacaactgcaacagtgacagtgtcacctgaaagtttgggttgggaactcttaactcctagaaacatttctttgcattatgaagtcatttataagcaacttcttttacaataataatgcttaggagtaaaatattaagcttctaatttcctaatgtgacttatttattagtgtatttcttgcaattaaggcagccagagttgctagactcttttgacatgagaaaggacttatgaaataagtagcagagaagaaaggaaaagtaggactgaacccctctagttttatctaggaatatcttgtttgacagtcttcatatttgtatgtttaattcctacacttggcttaatggacttgggagtctatttttccttctttattttccttatgatttttctatcttattttgttcatttggtagttacataataaatattttcctgaataaatgattctttttgttttctcttcttccatctgtctttacattagcgtattggtttcttttgctcagtatattgttactgagttagtctctaccctaaatcacttgattttctgtctgactgtgctctttttgctttgagagaaaccttcatcttcacctctttttagtccgttgtgctagagggctggatattgggtttgtggctgttcagcaaggttgcaatgctgagaatgaagaaggtcagcttctggacatcacttcacattctaaatgtgtgccatccagcagcctcactgcatgaccactgctgagctcatgtcttcaagctctctgaaagctgagggatggtttcaggagaattaattggcaggcatttcatcatgggctactagtgacagcatacagagctgttctttcccagttcactcatttcttcttttgcaaaagtaaaaatgtcttgagcatatttcaagtatgttgctagttgtcactagtatcaaacagttttatatatataatatgcttcacagcagcgtgagtgacatgacaaaaataagagcaaaagagcaggttttttttaaggaaccaaggtactctaagttgactcactggtaaggaagaataagccacaattcttgattgcagaggtgttgctttattgccgcattaactgcaagctcccatcagaatatgacttctgggtgtccatttctaagaccacgtgaaccgatcttgttaccacaccaggcgtgccctacacaagcaagagttagaagacaaagatacaacttcagacctgtagcagaaagaagaatgccaacagagtgtaattgtttagaaataagagaagggacggtatcagggtagtccaacttactttctgataataatggcttaacacaggcaggtgtacttcttgagcacactgggtactccgtgtgagtgggaagggtgctctacttattgtaggcactcaggctgacaaagctccatctccacatagcctttccaaaccctgaggcagggagaatacttactgactcatgcacctctctctctctttttttgagatggaatctcgctctgtcacccaggctggagtgcaatggtgtgatctcagcttactgcatcctctgcctcctgggttcaagcaattctcctgccacagcctcccaagtagctgggattacaggtgtgtgccaccatgcccggctaatttttttatttttagtagagatgggggtttcaccatgttgcccagactggtcttgaactcctgacctcagatgatccaccagcttgggccacccaaagtgctggagttacaggcgtgagacacctcacccggctcatgcacctttcttgggttacaggtgttagccacctcacccggcccatgaacctttcttgggttacaggtgtgagccaccttacccggtccatgcacctttcttaaaggctacagcccagaagtggcatacttcatctctgttatgattcactggccaaagtaagtcgcagcactgtactttaacatcagaggggacagggaagtgtgatgctgtcatgtcctgggaggaagaagaactggactacctatgaacagggccgttatctaccataggtggtatgctgaaataatgcctgctgctgaggaagaaatgagaaggtgttagagtcaagtctgaactcacagccacttgtgtaggttaacaataaaaagcatgtatagagggcactaactgtatacgtagtcctgtactgtaggttagctgtgtaggcaagttggagcccagaatgcttgatgggaagtatgtactttcagcaatagtggtggctacctgtgccaagaaatctctgttttgatgatctgagagtgctaggggaatggggcaaggaacagaggagtttgaagaagttgcgtccgttattctgagtgccctttccctatgctgagagactttgatctacacttatagcaagttacagatacagaacagttttaattatttagaaatgtgagtacctgtgtttcactgtaatgtaaagaatacgctagtgtcctggacatcaaaataagaggaatgccaagcttatatgtacctctgtggggtttttcttgagggcttgaaaggaattctaacttcagtagcacacactaggtattcaataaacatcttagtagatggattacaaaagattaaaagaatgttaccatctcatggataattcaaacagtagctaaaaaaactgaaagctgtaggaaggtattaactgtcaaaaggttggggttaggacgacaaaacttctaacgcaatgcaggacatctgtggatgtgtattctttttttcccctttgcactaaactggacactgtgagtagtttattgtttcatttgtgtatttgctcctacctaccctttaaaacctcttgaacgctatgctttaataagttctataaacttagtttagacataatatttctactaaataatgctatcccaagtagccagtttataatatccttgaattaattttgactgtgcttaacatagcttgggaatggagaagttgagtaaaatattctaatatatcagtctgacttttctccattttaaatctataatattgatttgttttggaaatttcttataaataaagcggtatatttaactttgtagctttattctgaacttgacaaaacatttctagaaaccttttatctagtttttcctaaatagctttctgtggtctctgcccattatcttaaacaaagtctgtctttgagtcagggagaaaagagaaaattattcaacagtctatctaaattagccattatttaatttatctgggtctatacaacttgtaaacagtgataaggaagatcttgtggtgttaaggtgtgtctcatattcacctggtggctatcaattactttcctgtttgaaagtatcagtttgtacaatcattgttctaatctcacttagttcatctcttgctactttatcagggagaactggttatttcaactctgacataggtctagtatttctttcaagggggtgaggggcagagggtaaagagtacactatggcttcacatgtacagtgacagtttgtaagagaaatggaaatagtgacagcccagactcggactctgagcaggaacccttcagtttaggttctacctttctaattagatagacaggacaacttgagcatgcctctcattgtgctgtctttccaggatgatgtgcgtgatactcactaactcaaaacacgcaaccagcatttctgttggtggaaatcctgtacctccttggagggagactcaagacctgcttcttccacaaagcccaacatcattctgttgtgcaaaagtgagccctcttctcccaactcccacgataccctcattgtccgtgtatggcatttgctgttgaggatatatagctcattcagtatacaattacatacaactcatttcctcgatgaatcagaaactctttgagattaaaaagagctcacgtgtttgagcctttgtatgttactggcttttaggttaaacatgtcacattaactctattaatcattggagtattagactataatattaattcattttataatctttatttatagaattatatttatatactactattatatagccgtatttatgatgcatattatatttattacattgctattattatttttatggatgataaaacagtcataagagggtaagtaacatgtctaaggtggtatagtaatgacaaggccagctataaattcagatcttccaactctttaaccttttacaccactctaggcttcatccttatattcaacaaattctgttgaatatagtgtattatcagtaaacatttgagctagtgctagaacttctttaatgtataatgagttggtagaaaatctgtagcttcagattaaaatatgcataagttctgttaaagtaagtgaatatagatatttctaagtatgtttgatacgttcccattatgatatatgcctctttcatttgcttaggcagtgctttgtcagagatggcagactataaattggatcttgaattctgaattactagaataaagattagtgagcattctttttgtgtaatagtagtttttggctgtatccttagccagcaatttttattttttaaaactctttgttttgaaataattatagattcacaggaaatttcaaagataccacagggaggtcccacatactattcacccagtttctttcactggttgagtgttaaatagctataggacaatatcaaaaccagcataaaaatcagaatattggcatctgtataaaatgtgagtatagctcgatgttgttacctgtatagattaatgtcaccattacaatcaagataaggaactattctaccatattctaccatcacaaaaacctccctcgtgccacccctttatagtcatacccacacccagcaccctccaccatccctttttccttgcaatcaacaatcttttctatatctctataattttgtcaattagagtgtgttgtgtaactgaaattatgcagtccatgaccttttgagaatgactttttttttctacttggcataatgtcattgagatatatccaagttgttgcatgtatcaataattcattccctttttctttattgtggtaagaacacttaacatgagatctgtcctcttaacacttttgaacacattttaagtatataatacagcagtattaactattggcataatgctccacagcaggtctctagaactgaattatgttgcataaatgaagaatttatacccattgaatagcaactgcttatttctccctgtccccaactaacagccaccattatactctgtgcttctatgtgtttgagtactttatgtaccttgtgtaagtagaatcttgcagcatttgtcctcttgtaactggcttattttgcataccataatgtctacagttctgtccatgtcattggcaggactttctttttagaggctgcataatattccatggtatgtatatactacatttctttattcattcatctgttggtggacatttagagtgaaatgtccatcatttagagtgaaaaggcagcctggggaatgggataatgggttatatccaaaatatgtaagcaaattctataactcaattgaaaagaaaagaaatcccaagcaatctggtttaaaaagttgtcaaaggacttgaatagatatttctccaaagaaggacctatgaatatggccaacaggtatatgaaaagatgttcaaaataaaaatctcaatgaaatataatctcacaccaagaaaacaaaagataggtgttggcagggatgtggaaaaattggaacttttgtacacttgttggttggaatgtaaaatggtacaggctaccgtgcaaaacagtgaaaactactcaaaaaatgaaaaaatagaaatatgtaatgcagcaaatcatacttctgggtacctatacaaaagaatttaaatcagaatcttgaaaaggtatttgcatttccatattcattgcagcatttttcacaatagtcaaaatgtggaaacaaactcttctaattgttgagtagtgttccatggtgtggatatactctagtttgtttaaccattcacctatcgtggacattctgcttgtttccagtttttggttatcataaataaagctgttatgaacaatcacagataggttttgtgtggacaaaggacagaattttcatttctctgagataaaggcccagggatgtgatctctgggccatatgttaagtgtatctttagttatttggtaaactgtcaaacgattttccagagtagctgtactgctttctactgtcaccagtaatgtataagagatccagtgtttctctatcctcaccagcatttgatattgtcactatttaattcttcggtcattctaataattgtgtagtgatatctcattgtgggtttagtttacatttccctaatggctagtgatgttgaacctttttttgtgtactgatttgccttcagctaaatctttcttaatgtctttaacccattttcaattggcttttgttttctacggttgcattttgagaggtatttttatattctagatgagtcctttgtaagatatacggtttggaaatatttttttctctgtagcttgtcttttcatcctcatttttatttatttaaggtagagatgaatcttttacccaggacaattgttgtggattcaaaaataaaaatattgaatggtgccatgcctgcatgccctctgctctgttagagattcatgggcagaggaaagagtgccatctactgaagcttgggcatcggttctccatgacagcaactgacaagggagggcaaggaacatgctcctttaagatgcggctgagagggccatccaccattcatgtagaaagcatcactcttgcaatttagtggaaaaccacaactgatccctgccaggataagggattgttgttgactttgtacactaagtctcttgaagcattgacaatgaagaaattaaataaaatacatgacattggtacccagctgatttcagatctctctcctgcctcagctttcttcgttccaattaattaaattcttctctctaattaaagcaatacattgctattagctctaggtatatttataacacatgccttgaaatgacatttccaaggaagactgatctaacctttgttttcgaacaagttatttaggttatttatagatttttagctttttaaaatctatgaaacgctcatttcataatattccacatataatgaaaattccttcctttttggaagaaataggtgatgatttactgatgtatcacagctgtattaccatccttttctatacttttttagtgttgcagagactaaatatgcttaaaattacaaaatttgagattggttcacttagatgtatagggtatattattttgaattaccatggagtaggaaatcctagttttctgtatgtgagataagtggtagctttaatatttctggcataaagactcatcagtcattttttggaaaatttaaagtattaattttttgactttagttttataggagtacttaaaatttggtaggtgaacaattagaagtagtaatccccatggactgacaatttgggtgagtttggatacatgtctgggtggcagatttttgaaatgccctaataaataactaaagagaaagccaacaccacattacatgtttggcaaatcagttttctgtgtggtactcttttcccctcaaagtatggcagggaatctgatttcaaaaattaaacatactcagctatgaattccttgcctttttccttactttttttcttttcaagagcctattttactgagaagcagtgtagctgctttcacattcatctgctactactgtggcaaatgtttccaccaaaaatgcttgatattgctatttggagtacccatgaatttaaaggaagtagacataattatacattatttgaatacagatagacgataaatatgatttcaagtttttttttttacatatttaaaaaaagtctgggtaaaaacaaacctgttagaaatatgaagctctgaaacaaaattctaaaaatctgtagtaaatgtattttttccctctgtatttttggattcttaaaatcctcttctttcaaacttttgataaatacaattgaacttttcaataatatcagttttgtgatgtgtttgttttattatctagctttcccccactcccagttttgaaagatttattttcccccaacattttctatgatttttttttcaaaagtaaagcaaagttaaaagaatttcacaggaacacccaaatgcccaacacctatgatatggtttggttctgtgtctgcacccaaatctcatcttgaattgtaatccccacatgttgagggagggacctgtaatccccacctgtcaagggagggaggtgattggatcacagcgatggtttcctccatgctgttctcatgatagtgagttctcatgagatgtggtggttttgtaagtgttgacaattcctccttcactggtcgtcttctctctttcctgccaccttgtgaaaaaggcatttggtgcttctttgccttccgccatgattgtaggtttcctgaggcttcccaaggcatgcagaactgtcagtcaattaaacctctttcctttataaattacctagtcttgggtactatctttatggcagtgtgaaaactgactaatacaacctagattctctctgttaatccatcttatattttgattcattctaaagtaaattgcaaatgtttggcatacaagtcagttacagttcaacattatttatattttatttaaaattttcataacaatagaatgtacatatcttatgtgtacattagctaagatttgaaaaaactgtacaacttagtaacccaaactgttatcaagttatagaacattagcatcactctagaaaattcccttataaccccttcagaatcagtttccttctcccaaaaacaagttagcttgttctagaatttcatataaaaagaattatacagcacacactattttgtgcctggcttatttcactaagcttaatgtttttgagatctattcatgttgtcatatttattgatagtttttttccctttttgttcgtaagcattatctcctggtatgaatatactatgtttgtgctaatgatgggaacctggaattcaaggcttttaatcccagaaaaagactttaagattgtgaaatagcatttcattaaaaactactctttcatcatttgtatacagttatctcttaactgcaattttgaaaactctgacatttgtatgtaaattttataatctagatcaagcttgtccaacctgcagccccaggttgcctttgaatgtggcctaacacaaattagtaaacttttttaaaacactatgagtttttttgcgtttttttttttttttagctgattagtgatcattagtagttagtgtatattacatgtggcccaagacaattcttctgcttccagtgttttccagggaagccaaaagattggacacccctgatttagatctttgtgtatatgtttaacttggttttcttgagcaaaatttttggactctaattattaaccacccttttgaagactacaggagtttctccctatcccgctttgcttttaggaagatcatcttggaaaatgccactgcaaagtctgtgtgttaattctaaattcccgttttttttttttaattaactttagaaaaataaagtcagtgttctatggaacaggttctgtaagggaagtttgtgataatatgcatgggcaagtaggattgacaaatatttttgctaaagctgcttaaacaccacaggttgatgtgtaaatgcataaatttaaagagaggggagagaacaggaaaatagctcttttcaatgattttgaaatttttctgcttattttcttttcctgcaacaacatagtgatttaatcagcattgttaagtgatcagttagcaatgacacataagcaattatattcaaaacctatcagtaacttcattttctgaccatctgacactcaaggttagggaaagttgaacatacataaaaacaatgtattagaaaacacagtgacattatgactaactaaaaccttgccagtatacatttttaggctactaagatcattatgtgggagattgcctttgaacattgttctttaaaagtttgtgcattggtaatgttatctgtagatgggaaatgaatgaagcacaatgtcttaacatcctctcagacaaatttatgtggagaaggaagaaattttgtgatttaaaaatcatgtttctttagtttaataggatgaagaaagcaaacattctatagagtatggcagttgtagaatatatatggtaaaggttgtttggcatttgtttcactgtagtgtcagttaatacatgttatttggaagagcttggaggagataaccagtaaatatccatatacagttccaacaggatgtgcatcccattgcctaaactcacttcaaaaagacctcatgaagttggacactgtccaaagctttcacaggggaacaaaagagatgatcaaatttatagctgctcaaggagaagcaagaagaaaagaatacaatgattttgaaatcctatagaaactttaagtggaaagatgacatcctttgaaaatctgcaaataagagcaataaaattagctttccaagaattagagatttgccccttccctactttctgttttacatttttacataccgtgctcctgcagtgatttgcttttctgtatttgtgtgaactttcacgttttctgtcctttgcttgtgttcttgcctctgattggatgcatctcatgaattcagtcatcttcaaaaccgtgttcaggcatcggttgcacaatcacgccacaatgattactgcttccatttcttcagaattatctatcagtagatttattaagttctctacctcctttctgtatctgctgcacatacttttgttctcacgaatcactgatttttccagtagtattacagctatagtaaccatagtagcagcagcaacaacacttgtataatgccacactgggccagacgtagtgctaagatttttacctgaagtatcttattaaatctcaccatatctttataatttcagtgctattattatgcatagtagtatgtttcattgccccagtggcagtgattctgaattatattctattaatatcttattgaaatgtgtctctaaaaaggacaaattattttatccaatatttcttataaaattacataccaaatactatagacttttttctgatctggtcaagaaatatttaacaaatataccgaaaagttattgatgtgtatatgcagcattacataaagtaagatatctccaaacctgagaataaagtcataaatctagagtatatgtgctcctatactctctgtacctgaaattaggaattctgccactgtttactttctatgccttgaaacaagatcttaaattcttgagcttatgatttgtatagatgatataaactatacaaactaggcctcatctagtaccctctattctttatattgatagtgttatactcaatctgatccaaactggtttttattaccatgggtaatgttagcaggtgtgcttgtaaagaaatgcaagggtcagggcaagggtagtggggtttgtgtgtagggtaaccacggtatagggattttatagggtgtgaagcattgttgaaaaaatgttttgaagtgtctgcttagggaactttgaaaaattttggaagcacatgagtgatttgggatggtacagtttcatgaaaaataaggtaatatttgtaaatatttgtggatatttatgtttttgaacatctctatccatctcatcttgcatctagatacttggttttgctgaacaattggatgttattttataatgatttattcttgatattgtagattttctcaaaatttttgtgtatttggatgtatatatctttagcgtatagttgcaatttttgtcttttagtggtaaaatggattctatttaatttttggagcacgataaagagttgtgatgggaagtgtcctattaatgctcacatttacattaatatcttaatgtgttagactttcttttcaagttcagattttatagtttatgtgtatagagataatataatattctctgatggttggttgtatttctgtggggtcagtgataatatcccacttatcatttctgattgtgtttatttgaatcttcttttcttctttattagtctagatagtggtctattttattaattttttcaaaaaaccagctcctagatatgttgatttttttgaagggttttttatgtctctgtcttcttcagtttagctctgatcttggttatttctgctagctttggggtttgtttgctcttggttctctggttcttttagttgtgatgttagcttgtcaactggagatctttgtagttttttgatgttgacattttagtgctagaaatttccctcttaacactgctttagctgaatcccggagattctggtacagctatctttttctcattagtttcaaaaaatttcttgattcctgccttaatttcattatataccccaaagtcattgtaccgatgggtcttagttctttctttcttttttttttttttgttttttagacagagtctcgctctgtcaccaggctgcagtgcagtggcacgatctcagctcactgcaacctctgcctctcgggttcaagcaattctcctgcctcagcctcccaagtagctgagactacaggcatgcaccaccatgcccagctaatttttgtatttttagtagagatggggtttcaccatgttggccaggatagtctcgatctcttgacctcgtgatctgcgtgcttcagcctcccaaagtgcgggattacaggcatgagccactgtgcccagctgggtcttggttcttaatccagcttgccattctgtgtcttttaattgaggcgtttagcccatttacatttaaggttagtattgttatcctatcatcatggtgctagctgctggttattttgcagactttttaatgtggttgcttcatagtgtcattggtctgtgtacttcagtgtttttttgtagtggctggtaacagtttttcctttccatatttaatgcttccttcaggaatcatgtaaggcagatctggtggtaacaaattccctcagcatttgcttttctgaaaaggatcttatttctcctatgtttatgaagtttagtttggctggatatgaaattatgggttgcaatttttttaagaatgttgaattttaagtttttcattttggagatgaaatgataacattttagacagccctcagtgaaagaagtcttatttatttctactaagtttggaggataaattagaaatttatagtagccagagcaatttgttggaggtggagcctgtggggaggtgactggatcatgggggcagatttcccattaaagagcaccatcccctcgttactatcctcgcaatcatgagatgtcatgaaatctagtcattttaaagtgtgtggcacctccctgttcactctctcttgctcctgctcccaccatgtcagacgccttgctccccttttgccttctgccatgattgtaagtttcctaaggcctcctcagccatgtggaattgtcagtcaattaaacctctttcctttataaattacccagtctcaggcagttctttacagcagcatgagaacagactaatacaggggcactctggctttttgagttttcagtgttcttgcgctgattctttcttatctttgtgggcttatctacctctgatctttgaggttgctgacctttggatggggtatttgtggttttttaaattgttgttgtttgcttttttttcttttagtggtctgcccactcttctgtagggctgctgtggtttgccagagggtctgctccataccctaggtgcctgggttttgccagtacctgcagtctccacacagctctatgtgttgtgcccaaggccctggtggccagggctcacgagacgatctcctgttcctacggttgcagagatccatgggagaagcctggcttcccagggttgcacattcactcactgcttctgttggctgggtgtgggggttcccttggctctgtgtcattcctgggtgggccatcaccccaccctgcttttcattctccgtgggtcaaggtgtttctctaatcagtgtcaatgcaagttcctggatatttcagtattcactcgcaccttttgttcccctcggtgagtgccacgtacagcagctgcttctaatctgccatcttggcctcctcccatattttctttatccatgcatgtgctgatggagtcttagactgattctgtactttggctattgtgaataatgctgcagtgaacatgagagtttggatagttctccaaaatactcatgtcattttctttggatatatacctagcagtgagattgccagatcataaggtagttctattttgaatttttttaggaagctttatactacttagcttggggaatttttaataaagagggtgtattttataattatggtaaatttcaaacatacagaaaaacagagaagaggaaaacatatctatgtaccctatatactactacaaaaatatcaattcctgaccttgcttgttttatgaatatgaaatctgtaccccccaacatccctagattattttgaagcaaacctcagatgtcacatttcattcataaatatttctgtatgtatcgctaaaagatgaggattcttctagaaatagcatcatattttcacatctaaaaacagttaatttaatatcatccattggtaggataaggttcaaatttcaccgattgcctctttttttactttttaaaaatttagctgggcacggtggctcacacctgtaatcccagcattttgggaggccgaggcaggtggatcacctgaggtgaggagtttgaccagtctggccaacatgatgaaaccctgtttctactaaaaatacaaaatttagccaggcatggtggtgcacacctgtagccccagctacttgggagtctgaggcaggagaatcacttgaacccaggaggcagaggttgcagtgagctgagatcatgccactcccctccagcctgggcaacagagcgagactgtgtctcaaaaaaacatatatttttaaacttaatttttaaaaggtttgtgggtacatagtaggtatgtatatttatggggtacatgagatgttttgatacaggcaaatgtgtaatgtgaaacaagcacatgatgaagaatggggtatgcatcccttcaggcacttatccattgagctgtaaacaatacaattacactctttaagttatttttaaatgtacagctattattgactataattaccctatttgctatcaaatagtaggccttattcattctttctaactatttttttgtacctattagccattcccacctccctcctgccctagctccccattatccttccaagcctctagtaaccatccttctattctgtatatccctgagttcaattgttttgatttttagatcccacaaataagtgagaacatgcgatgttggtcttcctgtggctggcctatttcacttaacataatgatctccagttccattcatgttgttgcaaataacaggatctcatatttttatggctgaatagtaccccattgtgtatatataccacattttctttatccattcatctgtttatggatacttaaagttgcttccaaatcttagctattgtaaacatcatttttaaaagaatattcagttttcttgaatcaggatttaaacaaggaccatgcattgcaggtgagtcatgtctcttaattctcatttatatatgagtcttccttcccctcctttttgatcttgcaatttatttgttgaagaaacaggatcatttgtcctctcattctccagagtctgtattttgctggttgtattctatggtgttaacattttttttctgttctacatatttattttaattgatatttagatctagaaacttaaatgtatttttgaggtaatatttcacagctgtttttatgtacctccatcaagaattgcataatatagtttttttcccctgcgatattagtggccatagatgatcatcgcttaggtctattatttcattgggggctcacaagatagtcatattcttccattctttcttcattcattagctagaatagttttataaagagagaaattttcatcaatgattttcctatcctgcgagataggttgtagagcaaaggcaaatttaatacttcatcctttcccttttttactggtttccagaaaaatataggttgatttcccagaatcctcagaggtgactattgagcacctttaaaacattattcacaacacatgaatataccatattttgggggcttatcaattattccctttgctcatgtttccaagttttttagccagtggaagcctcttcaagttgacaggatctcaacagtctttgatggcttctttgcttactgctatgacaaaatctttcaggctcattttgtacttttcctcccccggacgaggatcagctgtttctccttggagctttggtttcttagagtgggaaatggtattttgaggaccatgatctaggtagaaggagtaatcattgttactgggttggtcagtgtgtctaggtcttttcaatgaaacacagctaaataaagattacatatgtatgtcttgaattgatatttccagacaaaatttaggattatttggttttacttgattttctatttgcagactcttctctaatgtatcttcgttcctcaggaattaacatggtgcttttggaaatgttatctgttctttcttaagagaggtagagcactgtttcacaagttttgaggctacatatgttgacaggaagcttcaaattaactctcaatgatggacagacacctgggcagtgctccatgtatcatatcactgtatggaggtgttaaagacacatcctgggatatgtggttcgggcctggctctgccaactaatgagtcacttatttccttgtcgtgtaaaatggggataataataatctacctctcaagctttgtatggaagataatatatgtgaaaatgctttgtaaattattaatgtatcataatagaaatcatttccccatcttattaaaaaataatgtgatagtctttgaaccactatacttttgattagctttttcctcaagatttgtttactcttgtaaggcatatttgtcttttttgttaagttgccaggatagccttcctaattaccttctttaatgggtcttcctctctgtagttaaatgtatatgtttgtaagcctctcttgaggtgaatactctttggcttaaatatttgtttggcttaaatattaattaaatattttaatttaaattaatttatgatgttataggtatagaaaggagaatcaaagtaggggtgtgttttgttttttgtccatcaaagcataaaccttgtttttgatgatgctttatttctgtttccagtgtcatggtgtactgtagacccagagctgtacctctggggagatatataactaatctttcctttgatgggacctaatttcagagcgctgtcttcataacctggaatcaaatgaaaagtccaggtcaggttatccagctagatacaagtgtattgtgtgcttggtgttcctaggctctttattatccttatttggctcacaggcctttctgagctaagactttagaggtcaggtgagtgtgtgtgtgtgtgtgtgtgtgtgtgtgtgtgtgtgcagttattctttttaaattctagaagaacagggtccttttctttcttgatgccatgtttatctacctgaaatctcacaaagcagcagccagcatgtacttcctaactttactggtgtttcctttgtcctgccttcaggagaactgttttagttaccctcctgccatcttgtgctcttatggccctgaatttagccttttctttggtttcacagccttagattattccagcctagctttttttatacttaggcttctttctaacttttcttcccatgtgtcaatgatactttccttaaactcaccctgtactgttttacaactgcattctaccccttccagcaattttagccaaactttgcagttgacagtggcctccttcctgcagcctaggcttctgaaacccctttacagtatcttcatatatagacttatggcgctcattttcattcaccaacaattctgtccctgtaaggagttaaaatcattgttattcttaggtatttctagtatgaaataatagaaccatattctaaaactttggaaaataaacacttaatccctttattctttcatactgttttaatgtgtttttttcccttttgtcttatccccaataatttttgtacaattaatctggagtacatttttggttttttaccctcatatcctcagaaactgaagaggctaccaggagcattttgcatgtcctttcataggatttatcattaatactgaaagacaaaatttaatattttatactctgtaaaagtactaatgtaattaataattaatacatggtacaaatactaatagttttccaagaaagatacattggtcaggcttttttgaagtcttcagttattgtcctactgtcctattgttaacagttaatttccttccaggtttaatatacctccagtttcagtatacctgtagatttaatatacacattcatttaaataatacataatgtctgagatagatgtataacatgtttagctgttcctgtatcagaagtgtactaaattctcatatttttactattgtaaatacttatggtgaaaatttttgtgtacacatatttgttcatattttagattatttctttaaaatcccagaagataactaggttaaagtaacagtatttttagtatttttattactcgtgatttacatttctggatagccttctataaaggctataatagtttatgatacctttagcaaattggttacagcttttttttttttccctctgtcccccttgacctcaatgttcatttctttcttgggggttttagcgtgtccttttagcttcacaacagtatctcttttggaaggcactttggcttgtggagagaagaatgcacagtgtactgcagtggggcataggagagagatgcggaagaggtgtggggcagtggaagaccctgacagaaaggtggtggttgtgaggatggcaaagtcgttctgagatggattttctactttcttacggcattatccctggtaagaaactatctctaagctgcaagaattccagtgtccaatgttaaggaatcaacctgtgactaggttttaaaaacaatgatattggactctcagcaatcaaactatgcgttttcttatacaaaaatggaaaaagcaacaagaaatggtctccagatttataaagaatgggttatgacttgtgtactttactgaagatgttgtaacctggtttcatagttaggaacctactgagtattagccacatatgaaagtagaagtttacaattccccagaaattcattaaagagcctgaattgcttagcaacctcacaaatttattaaagcgatttcatagatatcatcttctactttatgtaacagttactaggtatgtcagtgtttgaaagaatatggtcatgtgcagttaaagaactggagaattgtgatctagcactgcaatgtgctgaattgattttcacacattgtgtattactgatcgctatatatttaaacttgctttagccaagtgtaattttgttatttagagtaaactggacttcggaatggtattgctttcagtcattcgagactatagtaggaacattttatagagtactaataaaaagagacatcttgaatgtaacattaaaccatttcattattttatagactatgccatctgtaagcatgccaagattttggggggaggagggggacttcaaatgactatgcattaattgtacctcatgtttagcatgtattgttttaaatgctttatcataggatatcctataacctgatggaaatgatggcatatagttcgtaacagagtgttttgcagaactttagacccctttgaagctgaaagcattatcctttaattctaggacctattctgcctttgtttcttaggcctttagattcctccatggccaagtatccagccctggcatgggtgcttattaactatgtgtccttgggcaattttttttaactctgctgaggctggctttatgatcagtgagttgtaaatctctgtagatcccagcctgctctcactgacaagttggtacctacagtaccctgggaactgcagctagagtggccagggaatattcagggaaaaagctataggacacagggattggggaaaatgaacagcaaaaatcttttatcttgggagtagaagttgaaggacaacattccaaatataatcttataatccaagtctaattcatataagcatttatagtgaaagatggggcagaacataagatcagattttctaggtattcttattagttaaagaccagaatttctggaacaaaatttctaggaaagtatgatttttgtgaggatgaaaataactattactatcattattaataacttttgttcaggtactaaatatgtaccaggagctagtaaatacttctatataaacaggtgaccctcagtatccatgggttccatatctgtggattcaacgaaatgcagatcgaaaatacttggggaataaatggatggttgtgtctgtactgaacagtgcagacttttttcttgtcattattccctaagcaatagagtataacaactgtttacacagaatttaattgtattttgtattataagtaatctagagatgatttaaaactataggggaagatgtgtgtgggttatatgtaaataccgtgtcactttttatcagggacttgagtatctgtggattttagtgtactagtgggatgcccaatctcctgcagatatttagggacaactatataattaattctgtcaatgactttttaaaagatacatcctattattatcttcatttatcagataaagaaaccattactagaaaggcttggtgatgtattccctgagtggtgcatgtgacataggaacacaggctatctgaatccagggcctgcagttgaactcacaccaagttgtgtatcttctacttgcccttataaatatactcgttgctgggcatggtggctcatgcctataatgttaacactttgggaggccgaggtgggtagattgcttgagcccaggagttcgagaccagcctgggcaacatagggagacctcatctctacaaataattaaaaaattagctggatgtggtggtgcatgcctgtcatcccacatacttgggaggctgatataggagaatcacctctgtgtctgggaggttgagggtgcagtgagcagtgatcgcaccactgcattgcaacctgtgcaacagagtgagaccctgtctcaaaaaaacaaaacagatagactccttgctcttctcttcaccacctatgtccaggagcagtggtgacccttcaggaggcatcagcaggttcccttgccccaaattcctgtcctgttcagctcatgagagatgtcatggcaggagaacataggacaatgggggagagcagtcagagtagtcattgtcctggtgccctccctgtggggttggctgccatgtctttacccagggtcacatctgtcaggaaccctcttcagcattctggtaactgttccctttccttgtcccttcaagccaagggcagagggagtgctaagttcttgtggtgactagacctgagatactgcactgtccctttttgattttgtcaaccttgcctacacttgctgtgaataggtccttcattaacttgccttcagtaacccagatggagtgtgccatctcttcttgcccaggtccctgactgatagaccagctctctcatttagagaaatgtgagtgttttcttacttttttgcagtcagtaaatatttattaagtatccagaaagcatgaggcactgttcttggtgtactagggtcactaatggagcaagagccatgagccctgcctgtgggcagaggggaggaaatttataagtatctatattttatatatatatttactatatataatgtatatttactatgtataatatatttactgtatatataatatatatttactatacacacatatttactgtacatatatatgaaagtatgtatatatttactatattatatgttataatagtatattatatagtattatatattgtatattactatattatatgtacatttatatatatttattctgtcaatgacttttttaaagatacttcctgttattatctttatcagatagagaaaccagtacccgaaaggtctggtgatatatggctggagtaaatatatgtaaatgtatatataataagtatatatatattaaacataaatacatatgtggatgagcaggcatttggttggaacttctaaggactcatacaatttagtgaaaatgtaaaaacaactttgtaaaatgtgttttggggataatgaatagaagtgtctagatggggctaagggctcccgtgaaggactagtgggattagatgagataatgtacttatgttgaaaagtacttggtcttttttttttaatcctgctttttgcaaaacttttgcacctaaattagtgttatatttatagttgttcatgcttgttgtaaataaaaactggaatgaagtagtaataatgcctagagtagtcctttcttgaggggaagctgagtttctttggatatctgtttactctctatgtcaggcctgcagttgtgtttggacacaccatggttgtaattcatactcttggttttagcaacactttcatatgtagttgtcactacgttgtaattacagcaataaaatccattctttgggaactattccagtgtttagaatgctgaaaataagtgtgcttagtaccagttgtcacaatgatttttccaatgctagaatttctaagaaatcagtgtctattgtacttcaaaacaaaactgatgtctaataaaattctccttttagagatggcagctctttgtagaacctgaaaaaggaaactttaaatcaaaaggaatattaaaaaagccttatgttattctatttagaaatattgaaagggaagaaggaataatcaagtatctcagaaaaaaaaatagcctggaggcttcaggatatactttgccttatttagaaattaagttggttctaacataaacctgagggaggagtagtttgtatgtgtgggattggggtcagcccatttgaccctctgattctttctgttttatataggaaaagctatatggaattctacctaagcctgtttctgtttaattatctatgggtgcactggtctctgctacagagtccacttaggctcaggcataatagcacagactgaagccattgggccaaatctggagagaagctgtgtcactagagtatcagcagagcaggcgacactgtgcttgggtaggcttttaccatgctgttcttcacactggaaattggtcagagtgttgctgtttattagctatacctaggaatttaatgatgtatcctttttctagtgatttaaatggacataattgcaggaaaggttggtaattcagcaagaagattacttagaaaacttttagaattggtttcatgatgctagggacatttctgatttctgtccatggtggcataggacatccatatgaagttgtagctatcacaacatgcatcttttaatctggagactgagaaaatattctgcctggtgtgacaaaatggctatcccaatatagccattttgatatgtgatatggtttggcactgtgttcccactcaagtttcatgtcgaattgtaatttccagtgttggaggaggggcctggtgggaggtgattgaatcatggagcagacttcccccttgctgttcttgtattctcacaagacctggttgttggaaagtgtttggcacctctcggccgggcgcggtggctcacacctgtaatcccagcactttgggaggccgaggcgggtggatcacaaggtcaggagaccaagaccaccctggctaacacagtgaaatcccgtctctactaaaaatacaaaaaaattagccaggcgtggtggcaggtgcctgtagtcccagctactcgggaggctgaggcaggagaatcatttgaacccggggggcgcagattgcagtgagccgagatcgcaccaccgcactccagcctgggcgacagagggagactctgtctcacaaaaaaaaaaaaaaaaaaaaatgtttggcacctcccactttgctgtctctctcctgctccaccatgtaaagattgtgcctgcttccccttcaccttctgccatgattgtaagtttcctgaggcctccctagccgtgcctcctgtacagtccgtggatctgtgagtcaaacctcttttttccataaattacccagtctgtaatacagcataattacatcctaactccccattgccttccagggagtctgtcctggacttcatccctcctctccaaactcttgataaacattattttttgaatatcttcataccatctcaaacacatgtctacagtagaactgagtgtctttctacgaatttgactccttagcttgaaggtttaaagcaaacttgtccaacctgtgactcatggggccacatgcaacgcaggacggctttgaatgaggcccaacacagattcgtaaactgtcttaaaacattatgagatttttttgtgatttttttaagctcatcagctattgttagtgttagtatattttatgtgtggctacactgggccacactggaagaagacaattcttcttcttccagtgtggtgcagggaagccaaaagattggacacccctcttataaaggatactagcaattgcctatttattcagattaagaactgcaaattcttctggacatattctccagaaaaagttcatatatgcagtgctttgcataaaattcaggcttgatgactagtccctcctgaagctaacctgagtatacaacatttaaaaagtagaagcctgactgcgaggatgacatcaaaggcccactgtccagtatttcatgtctgtacactggtggatcactacccttaactagtcttccccttctcaagcctcttgtaagaattctttcctttagcaacagcaatttatttattcgttctctgaaggaggcttgttttcctttctccactccattggtaacacatctcatcccatcccatttagaattcttgctgtagttctttttgcccagtgaccttttccaccctttaaaacccagccatgttacacctcctctaaagttgaaattatgcttcctgttatgttttcatggggacacatttctctacatagggactgaaagttccttaaggacaaggacagtcatttattttactactcaaagtgcatggtatacatatcaagcaaatacttttggttgattttgtatgggtgtgtgggtgtctatctttgtgtgtgggtgtgtttgtacctcaaccctgccgaggtgcccattttgctttcatgtgtggtcttggaagtcttttttatgtaccaatatagactcttttattaacatattattactatgttagttgaaagtgaaaaataattccactgaatattttaacaataaaagcaaaatatgtggtctctttcaaaattagaatattttccctagttagagagttagaataatttaaattttaaaatattttaattggatattaatgtatactaatttattaataaaagaaaatgtgtgtggggtcccacaggattattcctaggataaatagacagtttttttccttaagaatatgccacttaaaaatattagaatacactgaatcccaaatgaggtttatggtacatgatatcatgatttatgggaagagttggatctgaatatatttactgtatattcttatgatacttttataaaaaaattcctccccagagagctagagaataaacataaatggcaagtatgaaaaaccttttaaatattgggaaccagtaaatttttttttttgttttagttgctgctttcctaagagagatactcgatgaaagttgttgaccaaagtacatttttaaatcttgggtggtttaggcaggatttatgcagaagtgattttgtctttagattcttaaaagggttctggagagattttatttgatattaaagctgtgagattgtaaatggagaaaagtcattctgtgtgtatttgacagtcacccatatcctgtcactgacgctgagatggaagcaaactgagtattactcacttcattggctctatggtatttacttaactatattaaacaaacactggggaaacctcaggccctctgatataaaatatgcaaatccttaagcatgacaatttattagaaaaagagaaaaataaagtgtgtccattgacagttctgtgcagaatttaggcaatgactcatacatattttgctgattgtttttgtaataaaaattattcaagagaaaaattaatacatttttattttcataagcagttcattaattatgtgaagaaaaaaattttgtttcatgggtttcttaggcaacaatctgtactttggcttaatgtgacatattagttaaggcattttcctgcatattccaactttaggcctcttaaacctttgctcataaatgttactgttcatcagcctgtcagttagctgtcaagttgtggtgtcagctctcttagactcatcatagtagcccattcttgtattagtactttctacctaagtatttcttaaatgatgactgaattattttaatacacaaatatgaagtgaccatataacttcttttggttcactagagccaaatgcatctcactaaacttttaaaagaaggcaatttccaattccaaaagcatcttctgtcatgtcttcctttgcttttttgacatggaagtataatatttttaagataaggtatctggataatcaatgtattttcatggcttactcaatgaattttgtcactagatgtgactgctataacgtgtctctcttccttcttgtctaaggatgctttctacttctagctataatgtgtctctcttccttcttgtctaaggatgctttctggttctagccaaagaacattctggatttattgttttatttggttttgacatatgttctttcaattaaacacatttaaaaataggagatatacagacatgcataaagcatatatactttaaatagaagctataaattataaaatacatacctctgcacttgtattaccacttccctggtgaagaaatggaatgttgcttgcaccccagaagttctcacgtgccactgctgaaacacttttcccttactgcagaggaaagcactatcctgaatgttgtgattattattcctttcttttctttcctacctaatgtaggactctaaacattcagtttagtttttcgtgttttttgaactgtatatgaatgtactcatacagtgttgtgtctgaatgctttcattcagtgtttgtgagattcatccatgtcattgcgtgaagctgtaggttgttagttttcagttataatcattccctcatattaatatattaaacgtgaattatccactctcttgatgaccatttgtgttgtttctaacctggggctattgtgaacagggttgtgatgaatattctgagacataccagtgtgtacatacattatcttccttaatttatagatgagtggatcatagggttatattcattttccacttcccagataatgagaatagttttgcaagttagttgtgccagttcatatttctattatcagagttctggttcttccacatcctagagtatgtttagtattacagctgctcctttataatggggtcacatcctgataaaccaatggtaagttgaaaatatagtaagtaaacaatgcatttaatacacctaacctacagaacatcatagcttagcctaccttaaacactctatgaacacttacattatcctacagttggacgaaattatctattacaaattctattttataataaagtgttgaatatctaacttaagagtattgaaacacataagaccaacctgggaaaagacaaaaattcaagatacaatttctactgaatgcttattgcttttacaccatcgtaaagtcgaagagttttaagttaaaccactgtaagttggagatcatctgtattagttactgcttttgctatttcaatgggtgttcagtggtatctcattgtagttttaattagcattttctggataaccaataaggttgagttcctttctagatgtttattggtcgtttattcttttctgtaaagtattttgtttgtctttttctattgggttgtctgttgttcatttttgttttttgaggcattccttatattctgcatatctgtcctttgttggatacagttttgttatacatgtattttttttaattttgtgccttgctgcattttatgattggaagtttagtctaaatttctcaatttttttgtatgtggtttataccttttgtcttatttgcatatttttttgacatttcattatttctaattcactgaaaaaatgttggattcaggttaagttgtatgtaataagactggaagaaaaatggccatattgcactgtctctaaagtaccctggagtggtacactgtgatcatatgcaatatccaatagtaatttgaagacatattttagaagtataatttaaatgtttttaagggctgcagttctgagagttttctttaagaagaacagggatagaatatgcaatgggtaattaaattccatatatacatgtgctaaattaagttttttggaggagataagagtgccacaatatgatttaaaagctgcaaaacattaaaaagtacaaataatgtaacagaaaggcagaacatctgttacttaaaggagatattaaactttgagtgctaacacaaatgctatgacataattctagagtctacacattattttgccttattttgagtattatatattatgaatattataaatattatgagtataattatactttttaaaggttaatttttgtgtatatttggagaaggtgactacgcaatagtaagactgatcttattaaatgtgtagaaaattatatatctgtagcttcaaaggagttatttttgaggttatgcaagtatttagaaagtactgctgcttctcaaattttgaatgcagttttggaattacattcatgaccatataaataggtacttaatacattggtttatcatgagaatttaatctcatttctttgtgaccataatctatattttaaaaataaaacttattgaggtataatttacacataataaaatgcataaattttaataccttttgagctttaaaatatgtatatactttcatatccaccattagatgcccactggtggtattccattgttggatatatcacatttcagttgtttccagtttttttgccggtatgaataaaggtgttatgaacattcatggacaagtgtatttttagacatgttttgtttctcttgggtaaatacttagtaattcattatgagttgtgggcaagcatatatttagctttaatatataaagctttaaaatatataaatataaatatatattatatattatattatatataatatatttatatttatatatactataatttatatataatatatattatatatataatatatttataatatatatcatataaataatatatatttataatatatatcatataaataatatatatttataatagatatcatataaataatatatatttataatagatatcatataaataatatatatttataatagatatcatataaataatatatatttataatagatatcatataaataatatatatttataatatatatcatataaataatatatatttataatatatatcatataaataatatatatttataatatatatcatataaataatatatatttataatagatatcatataaataatatatatttataatagatatcatataaataatatatatttataatagatatcatataaataatatatatttataatatatatcatataaataatatatatttataatatatatcatataaataatatataaagctttaaaataagacaattttaaatcattgtctacagttcttgcaccatttcatattcccaccagcaatgtatgggcattctggttggtccacatccttgccaacacttgtgttgtcaagtgatgttgaacatgttatttaaagtgtgtgcttgtatcttttgtccattgtgttttttggtttatttgtcatattattgagttttaagagtctattttttatgtattttgagtactaaccttttgtcacactgttttccaaggagaaattgaaaattgttttaatgatagtgtcattggatgtgtgtgtctactttcttccctgttttgtatgcatgagttctaaaccacccatccccacaaaggagtttccttacatttttactctgtatgtgggtgtgtttggaaagatgagaaagaaacatcattattatgcatggtactggtaaacaacaccaccaccaccacccagacacacaaaaaaatggaacagaatagagagcccagaaatagggctgcacacctacaattatgtgatctttgacaaagctgacaaaaacaagcaatggggaaaaaactccctattcaataaatgctgcttggataactggctagccatatgcagaaaattgaaattggacaccttccttaaaccatatacaaaaattaactcaagatggattaaagacttaaatgtaaaatccaaaactataaaaagctggaagacaacctaggcaatactgctctggacttaggaatgggcaaagagttcatcttggagatgccggaggcaattccgattaaagcaaaaattgacaagtgagatctaattaaacttaaaagcttctgcacagcaaaagaaactatcaacagagtaaacagataacctactgaacaggagaaaatatttgaaaactatgcatctgacaaagggctaatatccagtatatataaggaacttaaatttacaagaaaaaaaacccattaaaaagtggacaaaggacatgaacagacacttttcaaaagaagatatacatgcagcaaacaagcatattaaagctcaatatcactgatcaatagaaaaatgcagaacaaaaccacaatgagataccacctcaaacccatccaaatggctattattaaaaagccaaaaataagatgctagtgaggttgtggaaaaaagggaacacttacacattattggtgggactgtaaactggttcaaccattgtggaagacagtgtggcaattcctcaaagagttaaaaacagaatgaccattcaacccagcaatctcattactgggtgtacacctaaaggaatataaatcattctgccataaagacccatgcatgcaaatgttcattgcagcactattcacaacagcaaagacatggaatcaacctaaatgcccatcaataatagactggataaagaaaatgtggtacatatacatcatggaatattatgcagccataaaaagaaatgagatcatgttctttttaggaacatggatggagtaggaggccattttccttagcaaactaacacaggaacagaaaaccaaatactgcatgttctcacttgtaagtgggagctaaatgatgacaactgtatcagtccattttcacattgctatgaagaactacctgagattgggtaattgatgaagaaaagaggtttagttgactcactgttctgcattcttaacaggaagcatgcctgggaggcctcaggactcttatgatcatggtggaaaatgaagggaaggcaagcatatcttaccatgggggagtgagagagagagagagagagaaggaggaagtgccacacactttcagacaaccagatctcaggataactcacacactatcatgagaacagcaagtgggaagtccacctctatgattcagtcacctcccaccaggtctctcccctgacatgggattacaatttgagatgagatttgggtgaggacccagagccaaaccatattattctgccgctgacccctgccaaatctcatgtccttctcacatttcaaaacacaatcatgccttcccaatagtcccccaaagtcttaactcattctagcattaacccaaaagcccaagtccaaagtctcatcagagacaagacaagtcccttccatctataagcctgtaaaatcaaaagcaagttaagttagttacttccaatacaatgggggtacaggcattgggtagatgctcccattccaaatgggagaaattgacccaaagaaaggggctgttggccccatgcaagtccaaaacccagcagggcactcattatatcttaaagctccaaaataatctccgttaactctgtgtctcacatccagggcacactggtgcaagaggtgagttcccatggccttgggcagctctgcccctgtggctctgcaggatacagccccttttgctgctttcatgggcttgtgttgagtgtctgtgactttcctagacacatggtataagctgtcagtggatctgtcattctggggtgtggaggatggtggcccttttctcatagctccactatgcagtgccccagtggggactgtgtatgggggctccaatcctacatttcttccccacactaccccagtagagattctccatgaggtttctgtccctgcagcagacttctgccttaacatccaggcatttccttacattatctgaaatctaggcagaggctcccaaagctcaccttttgccctctgcacacccacaggccaaacaccatgtggaagctgttaaggcttggggcttgcaccctctgaagctatggcccaagctgtaccttggcctcgcagccatggctggaactggagtggctgggatgtggggcaccatgtcccaaggcagcacagaacatctaggccctggacctggcccatgaaatcatctttccctcctaggcctcaggacctgtgatgggaggggctgctgtgaagatctctgaaatgctctggagacattttccccattgtcttggctattaacattaggctcttctttacttatgcaaatttctgcagctttgaatcacccccacccccgaaaatcagtttttcttttctcccacatggccaggcgcaaattttccgaacttcttgctctgcttcctttttaaacataagttacagtttcaggccatctctttgtgaatgcacacgactgtatgcattaggagcagccaggtcacattgtaaatgctttgctgcttagaaatttcttccaccagatatcctcaatcatctctctcaagttcaaagtttctagggcaggggcaaaacatcaccaatctcttcactaaagcatagcaagggtgaccattaccccagttcagaccacctcagcctggacttcattgtccatatcactagcagcattttggtcaaaaccattcaacaagtatctaggaagttccagactttcccacatcttcctgtctctttctgagccctccaaactgttccaacctctgcctgttaccaagttccaaagttgctttcacattgttaggtatttttgtagcagtgctccactaataccaattttctatattagtccatttttacactgctataaagaactacctgagactgggtaatttatgagcaaaagaggtttaattgactcacagttctgcaggcttaacaaggaagcatgaatgggaggactcagggaacttacaaccatggtggaaggtgacagggatgcaagcacatattaccattgtggatcatgagagagtacaagtgaaaggggaagtgctacacagtttcgaacaaccagatctcctgagaactcactcactatcatgacaatagcaggggaagtctgcccccattattcaatcacctcccaccaggcccctctcccgacacatggggattacaattcaagatgagatttggatggggacacagagccaaaccatatcaaaaactcatggacacaaaaaactcatggacacaacagacactgggatcttcttgaaggtggaggttgggaggaaggagaggatcagaaagaataactattgagtactaggattagtacctgggtgatgaaataatctgtaaatgaaaccccaatgacaccaatttacctacataacaaacgtacacctgtacccctgaacctaaaataaaagttaaaattaaaaaaaaaaaaacctagctattatggaaaaaagaaagtcattgtaaccccttctgttagatatacttttaaaacgttaaagtaacttttcacttgtaaatacaatgtgtttttgataaacacctgtcagagcactgtgttgctatatgtggcatccagactcttagcataacctctcatgatctatggcagctttaggtcagtcttaaaaaaaatgttgaaagggccaggcacagtggctcatgcctgtaatcccagcactttgggaggccgaggtgggtggatcacctgaggtcaggagtttgagaccagcctgaccaacaaggtgaaaccccatctctactaaaaatacaaaaattagccaggcatggtagcgggcgcctgtagtcccagctactagggaggctgagacaggagaattgcttgaacccaggaggcggaggttgcagtgagccaagatcatgccactccagtctgggtgatggagcaagactctgtctcaaaaaaaaaaaaaaaaaaaagaagttgaaatattcattcagcattcaaggggacctgatgtctgagattagtttaacctaatgaagcactggtccttaaatttgggaggaaagtttgagagtctgatgacaacgtacactatttccccagatacaaatgtacatttatgaacatgcatatacataaataattttgcatgcaatcatatgagagtctccagtttaaaaacttctgcaataaaaattcctcttgtgtgtcttcattggctactgcatcttcacgtcttattgtgtggtcctctttatctgtgtctcagcaaggaggtgatgtgaggataatcttgcaaaatgtagagtcttagaaaggtgagcttttgcctgagaccccacttcttggttaacttatggtgagtgtgcctgtgttcatctaatacctttcatataaggaaggcaagatgatttatccaggctgaggggggaaacgaagaaaggatcgtgacaacctaatgcaggttcttgaataaaaggggttagtttctaattttgatgtggaaccataaacatgaggatttattcctagtatcatgggtgaatagttgcttctattcccgtgtattcctcactgagctttcttgagtatcatcacagataactctgttacctggtaatgaagaactctgctggggaagtaaatggaatgtggtgatgttgggtttttctgccattttagctgatttgaggagatagtctttctacagataggaagttctcatgccatgagtgatagggcagtgttttttatatccatatagtggattttagtttttcactggaacatggataatgagaaactgtctctaaaaagtatctctgaagttgagatttttggagggacttcttgagggaagtgttttaccaggaactggaacttcattattggtgataagctcttttcctttggagtttttattttgaagcataatactcacttgaataggaataaattctttattttttgtttatttctgggcacagtgcccaggtttttgttggggcaagtttatcctctaaagaaactttcttaaacagtagatgtttcatagtctctggtggaccgagcagactatccagtacattgagagcaggactctttgagacctcctaaaacaagaggatcttgaaatctactgctgtggaacagcagctccaagggagcaacacttgtctcccccagaaatacttagatttgttgctttaagtcttggttgcacacactgggtgatatctgagagtagaagagaaagctcatgactttagagacatgtcatcatttcattggctgcaagtacacatctcttcctgttgattctccccttagttctatagctaaattccttgtccagttaccaataagtatctctttttggaaaactctgtccatttttaagcaacactcctgcattcaaggctacagattgctcagtgcttcagtcagctgatactgctccctaaagttatgcaatatcccaatatccctgcttgaatttccacatagtagctacattcctttctcttcctcagaatcttgcttctctctgatttactctgcttgtctgttctatataagatgcccccatttgttgcctgcattcctggatgcgttttcctcactgctgttacgcaagtgccaaagtcattctaccttgcaaaagttttaagtgcccttccctaatttagaatgttttctgaaattatacttcattcattactattcaacatgtattaagcatgtttatagtgtattaggaattggggaagtggtcctggaggagatcatgacccaggacatactatgtttagttgtcctatgatgtgataagcgctagctgtgtgaacatgtacaatggagacatagaaatgtgtttaaatctgttgtggaggattaaaggaggtcagcatatatatctgaataacaaccacaaacccagtagcttaagtgataatcatttattgttgcctgcaagtccgtgggtcagctgtgctattcttccagttttgactgtgtttactcatttgtccacggttagccacaggctggaaatttgtctcagctgatcttgtctgggccctttcaggtattttggggtgagaaggttgtaggctggtttagaatagatgcagctaagtagacttatctttggtggcttcttctccagcaggctagtctgggccttttctcatagcaaaggaaatgttctaagaagcaagcagaagtgctcaaggctttttgagatctaggctcagaactggcacactattatttctgcagcattctattggccactgcaaatcacaaagccagccaacattcagagggaatggaaatagacttcaccttttgatgagaagtgctgcagagttgcatggcaaaggctgtagatacatggtgggaaataacttggaccattttttataatcgatctacgattgcacctttaattgataatcagacttcctgaagtagaaaagtcagtagaaggcattgaatacagatatatggaaggtttacatgatagaaaacaaacaaacaaacaaacaaacaaacatgtatgggcagtatgagcaacttaattccaaagttattcctggtatgataacttgttttagtgtcattttccaatctacttcactgtttacagtcttaaagtttaggggtaaggagactattttaggccaattccttataaattaagaaacacctagaaatgttgagagccacccagtccttaaatcacattcttgacagaagtggaactattactatgaactcagatctcctcttttcatggtactcttcataagcactgtccatgtttccagttttacatttttgaaaggtaggcatgtttcatgtgttatttcttaatgtgacctaccttctacattctaaatattttttcacagtatctgtcactgtgggctcatcagaaagacttgtgcaaatagtgagagcaaatgcctaaaccctcatgtaccaccttgtcctcatgttgagattttaataagctttaaatgatttggaatagaagcagctcctgtgttatttcacttttgtctgtgcctttgtgttctaggcacagttgtaatgttctgaagtcacaatctgagccattaagagtaagatcatgatgtctctggatacccagagtgagtgccttggtcttatttgtaattttagaactgctgcttcttggggacctgggtcaagtgattgtattagactttgaagagttctaggccatactgtttgatgcacagattccatcccactgtcgtatcactttcttctcttcacaggaacatagcaagatctggaggagaaagagaggaaactactccagctgtgttctttatcatctcacacttgttcatacttaaccatacattaagaattgtgagctgggcacagtgactcactcctgtaatcccagcactttgggaagccaaggcaggaggatttttgagctcaacctaggtaacatagtgaaacctcatctctaccaaaagaaaacatagctgggtgtggtgttgtgtacctgtggtcccagctacttgggagactgaggtcaaaggattacttgagcccaagatgttgaggctgcagtgagctatgattgcatcattgcactccagcatggatgacagaggtgagaccctgtctaaaaaaaaaattttttttttgattcatatcttaattcctgctagagaaaccaaggcaagatgaagagaactgggactgaattcttagctttatgaaggctgtgtgcttaattattcttaaagcttggcttatacaagccatacgttttcaggtaatcctataaaacaaatgaaagcacaatcatccacatacctatgaatatttgaatattatatttagaacaaatagcaaaatgaattgaaatacttctttacttaattttaaatagtatgtatgatcataatttttctccattacattattttaatgatgtactttagtaaaccatggttgcatgcaagtgaaacttgagattttcaaaatactccttaattcttaaaaaaagtaagaacttttttagtaatatgtatacacatttgatcttcatatattctatagtttatgggtgttcaagtatttactgacactcttagctgcaaagccctgtgctagaagctgtaaatgagatgattgtgacttagacatgatctaagcctatcaggtcaagaaagacaaatgtgcagctattataaaggctctactatggcagataatttttctaattgctagatgacattaattttccattttgcatttgggatatgctagaattttatattttcacctttattcaaagacactttgaagactaaaagttaaaaaaaaaatctatcttattagatccttcaagtcaaactattgcccaagggaacaggtggagtgagttgctttacatagtaagttaggattgagtactaggcatggagttggtttatacattttcttctgtgttcttatagatataaacttttcaccttattggattcttcagcttaaaaaaatacaaaaggattattaactattgcccttaagtgttaaaaacgtctcttggtcttagtaaataagtagcctgaactaaagatcctaggaaagattgtcttcattgtttgcagccatcatgcaagacatatgcctcttgcaaaaattggtgaccattcactttgtcagttacctcaaagctgaggaatgaccgaaggcaaaaagtgtataacctctagaacaggcattcaacaaattattttttttttcttttccaaaccttgtaggacttaacacaggttatttaccatatagatgttgttttcattgctagatttctagaaaatatgtgaaaagctcaaataacttcatttctattgtgtcagcttctaatattaataaaaattttactctagatccaacaaaagtcctaacttttatttccagggtacaatctgctattaccaatgtgtctgagtatttttactctttcataataacctatgccaataaatagtcaagtgtccaatcaatccccatcatcgttgcagacatttaaaagctcatgtagatattaaaatgcattatctcggttccatttctttggaggtctatacagcaaatatctttgtccttgaaaatgtaagtagccaggccagctatcacattgttccaggtgttttagcattccctagctatagtagcagtctagataggctgatctcagaaaatgctaactcctcaatttgcattcttagatgtgttactgctgtactgaatgttatcagatactcttgacctaaagagtaatcaatagcagagattttagttttctaggttggaagaaccttggtaattttgacataattgaacaattgtgttgttttccctaacgttcatctttggcttccagtgatagccccaaagaagtaatttctttctgtattctgaacctgtattttaggtatctggccccattgagagatgcgccaagatattcttgtgtgacacagctagataggctaggggtttctaactcaaccatcaatggagctggacagggaaatcaaattccctgaatgaggtgggctgaatgaaggcaagaaggaatggtgataggtggccaagtggagggtacacaagtgtgtgagttgtgtatatagcatcgtggctcagatccagttgattaccattacactggaatgcaggcccacttttgaaagattacatgtttcccccacatcatcccaagaggagctagtcagattttgatgcagaatttcccacctttaacatactgtgcaactaaagaaaacacttctgtatgtcaggatgtggttggcactgtgatccaggcttccctatccatgaatggtgacatctgagaccattttatcatcatcttaagtactttcatacattatttaacagcagcattgaaataacattaatctgtctttataaacaatggatgctatttacaaaaattatgatacaactacctaggtcaaagccaaggttccttttgatgctaaacataaagttgcaactattactatttacagtaattctagcattaatgccattctctaagattggaagactttgagccaaacttattttcagtctacatggggacctcagaggaaaacacccctacagataattcacctcaacctcagatgtccaggcaagacgaacagaggtgtgaagtgctggttgatagctctcagtgaggcctccagataatgtatttctttttcatctgcttcccttggggaagaagctattccacaaatgtttattgagtatagaaccttctgaattataaattttcatcccttctgttgtgtcccttgctctgaagtttttctccttcaatcaatagtttccatttcaaccatgtttattattgcaattaaccacctccttctaactgctttttgcaatgttttataaaagcaaccaccagatacttccaagtatcctaaagaaaattgtcctcccgactccagccccagctattaaacatttaaaacaaatgaagttatttattgagtacctatagtttgccagggaatatgctaagttgcggggtgtggtggcctatgaaaatataagacatagaaatgtatgatcttttaaaaagttgctaatatactgttctgtcaatactgtctctggaaggagttcagataatgtataataaatcattagtggaccaggccaacatctagttaagcactaatcttggttccaaaaggttacagaagtatatttctgaagtgactcccatactaaattttgatcctttaaagaagttactactcttcctatttggtgatttatcccccctctgtgaaattatttttttgtttttcatttccttttaggaacagaactcattaattgctactaatagcaattgtgtgatgtttttaattcctaaagaaaggtgctatgaaaatctagttgatcttaacatgagtttaattttaaagtattaatgtatagaacatgcagtgtggctttgtgagttatgccaaaaatgaagccattaattcccaagttgagtttaaacccaaattttctttcattgcagtgcctggatacctgtgtattggatgagcagttgagtactgatgctttccccagggagcactgccagtgacttgccctacaagtcaggcctccttttaagtcaggcctagtagtgagcagtgattcttcctagtaacaactgatagattgagggacatttttgaagcactcaattcctcagtttcttttccattatacttttttgttaaattaggaacaggtagtaacccttcctctttccccatctcaaacccaaaagaatgtccccaggaagattacccagtgacattcacagtaaaggtgaataaatgttagtgtgaatccacaaggctggtgttaacggtttttcccttcccctttgcttgtgtttcccacctgctgaataagaatacctgaagaagtgtcaagaagatgctgctgttgaaggccttggagtccccgagatgcaacttactttcccctttaaaatatctaaacaagacatttaatattgaaaccaagtacctcatgaccagaggcagaatgagccacaatattcaggaaccatttcctcatctccatctggaatacagtactctgctataggggttttcaaacttttgttcacaggacctctttgctgtcttaactccttgagaacccaaatgagcttaagtatatgtggcttatatttatcaatattttggattagatattataactaagggattctaaattatttaacaaatttatttaaaaataaacccattacatgttgatgaaataatatatttttatgagaaaataactatcttctaagaacaaaaatctttactgaaaaaagtattgttttacattttcacagatttctttagtgtctgatttaagggaagacagctggattcttatatctccttctgcattcaatctgttgtgcctattttggtttatgtagaaactgggcctcatacaaatatgtagctggaaaagaaaggatcattttaatactcttttcaggtaattttgggtattcttctctaatactgtactaaaacttgacaaatggtagtttcttaaggatttcttacaagggagaaaatgaaacaatatcaatgaactttctgtactgtaaaatacactggtctatcttgcattttgaatggaactgttatccacacgtgattttgtaacatcatacatttgtcccttggaaaatattcatagattgagttatgcagatcttccaaatagtgacagattttattatttgttatcaaaatcattgcatttattaatattaccactgatcttatcagaaaggttcttcagtactgggaagctgtcaagctcatggtggcaaatacaagttggcaaaaattctaattttcctttgaaagctggaattttattattggcaacagatacagtgagttttcattgaagtaatgggcttactttatatattttcaagaaaatctttgccaaataaccagtctggaaaaccatcatctgcctttcagtcattcattcaaataaaaaaatggtgttccatgaaaacagcaggtggttcagcttgcaacataatcacacaagttctttttctttgcagaaccatcatacatcagaagtgcttcatgtgtacttcctattttgtcacatagaatattaaagatacgtaagttcaagggttgaggtttaataacatttataattgttattgcttggttacagaccttgagtgaaactgcctgttgtttatgttttgaactggtactgggtagtggtaaaaaacaaaatgactattcatatagttgggtgcctctgccattattcatgctaagacaccagcagtttgacccgccatcagtccaaatggcaacacagtaaataaggccaataacatgatagaattattatggaaatagctttgaccttttggacttgagacccccaagagtctgtggaccaactttaaaaactgctgttctattacatattttccaaatgcctggtttgcattatcagatttactctcatactgtaaccccattatacttcatcaagaagtggggctatgctacctttcctcccttatccaaacaccaaaactaaccatataggtatctttacatttgccacattttagtaattccttatcccagttcgccatgacgaacatgtagacatgagcttaatccaagctgtaaccatggttactgttttccccaggctggccctacttgttgggccacagctggctcgtacctgctgtcttgcccattgctgcccaccctgccattctcatgtgagctagcctcggcttcctgaggttccctatgaggtatcctgagctctgcatggacacatccttctactgaattttagtgccatgacagtgagaatatcacccgcatcccttagttgcagtgtcagtgcttaaaggtatttgctgaacttacaatcatattgggaaatgtgagtattaaagtcaaaacacttctggaacctaaactcatacctattgtactgatttttaccagataaaggaaatgatgacacttattagttggcttggattttaaaatataaagatcgtattgaaggtagatggataggaggtgaagtatttgaaatgcggcattggacctgggcttacaaactccaggtgtgattcctcctcttaccagctctttcaccttctgtgaggtgagctacctctttgagccttatttttcttgtctgtaggagagtgttaatatttacccgtaagtgttgtagggaagattaatctcgttttgtagatagcagctaccatactgtgtggacatagtagataactattttaaaaatcataatttataaatttggtaattagacatttacagatctgatttcagctgtcatatacggttgcattattatagtgtgaattcatgcccccatgattttaaaaagtggtgtttttggcatgtgtgcattcgctgaagttgtaaaacacattttttaagtgtacaagtaatggacagcagatgagaaacagattgcaaaaactcttttcagtatccaaacatgacagtaaactcatattgttcaaagaatagggcccttaattgggtgggatttttatttgatttatgacctgaggctaatactgtggcttggatatgttctaaccccatgactgtctaatagcttacatatatgttgggtagtaatgccagtggataggttttattctgagaaccttcattcttaactcaaatctcaaaaatagatgacaaggcagaaaatatttggggtgataagattgaatatggaatagagcatcaattgcttgctctcagatactagtcttttttgtttttcaagtaatggagaaaccatatattattttcatctgggagtgtctgttgtgtttgcatgcaccagatgagctggagaagttgtggcctgcaagtaacataaagcaaataaaatttttgccagacggggcataactaaatgcttaccaccctccctgaaagttagttacgttttgatcattggtctgctatattgaatgctgatttttttttccagtttgacatgatagtaagtgacattgcattgtataaaaaggatatttttatttacacacacttaaaaatggatcctgggttttaaggaaatttccttttaagcacattttggctctggtaaaatctattctgaagaacttataggcaaatagcttttgagaatttggactcattagcagggcttatttctttggctatatttcctgataatagttttctgtaagctatgtgaatgtcagagagcagaaatagtcagaatttttcttctgagctcattagtgaatgcatacaggatgaggtagcctgaaacagtttgaggtataatcagtgtcttctcactctctccttttctttcatctcattctttaccatgtttgttgggcattagtttaaaagcctagcatttaataggaactttggcatatgtaaatattttctaggttcagttttagcaaatccgttgctctcatgaagactgtagagaaaatgtttgtactgatttaggaatgttaagaatgtggtggggagtggctcttcagaatactgcagtgtggtaatcatgtttgtggctatgattttcttgtttttgtttttttttttgtctttgttctttcatctcagcttttcaaaatctttagaaaatataagatattcccattttagggtttagaaaatgactcaaatatatgcatatagttgtgaaaggtgttgagatagcctcaaataataagctatatcttttgaccatattataggtggggtctctgcctgggaatgacccaccctcaagctgtttggctcctgttaaaaggactagaagggctctgccagaggaacaaggatgctcttcctggtgtggctcttctgtggcatctggttcagggctgtggtcccactcccaatggcagattttcttattttagagggagtgagtcacattcctcaaccagtggatgaaaaattccagccattccaattatccacgcctatgatcccttctgttttacacagatcattgagtcccaactcactagaccaagactcagggaaatcatgctatgatcttggctgtgccattggccaattttgtgacctcagggagtgtgtaaaatctgggtctcaatttcctcatctgtaaaatgaagtaattagaagaaaggccctttttgatgacacagtctgtgacctctaactggtaatttttataagtattctcacaagaaagctgtggttgcaagaaactagaaattagtgggataaatgagatctaacataggcatcgattagcgtacttcttaccaagttttagagggctccaaggaatatcttgggctgtatatgtgatatagcaaactttaaagagtttgtgactgtgacattgtcctctcacagagtataaagctgttcagtaactatttatggaatgatgaatgagtttgcctgatgcctactggtatgaattttccttcttgaacttactctggtactaaccattctttgtctgaatatgatgatcttttccatgcagcagtcaccagtagtaatggacttgactgcctgtggagcccaggcaatctttataatgatggattgggctctcaagtgggggagtaaagcattttaagttgatgaagacattgcccctgctcttgagaaagaaacaaataagcaactaatcatagaggcaaaatgaaataatagatgtaatcaaaatgtgaacaaggtaatggtgggtgcgatggaataataaattaattctaattggagaactgaggaaggattcatatgtgagatgaagagtcatgaaggttggacctagagagatactctctaatattaaactagagagggaaaaataaaaggtaatttcagcaaaggagaagggctttttggattaaagcagtagtaggactccaaatatgtcactataggaagggcatggaatatttggagaaaagtgagtcgatgtagagaaaccaataggtggctattgctgtagtgagagcaagagatgatggttaacttggcccagagagtagttgtaagagtgaagggaagtgaacagcttgagatagatttagaagataaagtcaatagaatttgtcgatggatatcataaggggggttatagagaggggtatagatgaatcctagaattttggctcacacaagtgggaaactatcaccatttgctatgaaaaaaaaacacctaaggtgtagaatgccatgcactcagttttgggcatgtaggtttaggcatctatgttgagatgtaaggttggagccctcagtaataagtcatggtagaaatgtgtttgggagccatccaggttaaagtcctagcggtagatgagcttactggagagaaaacagagatatggaaaagtagagtcatgtatctaggactgagtgaacattgagggatttggatgtaaaggctgagcagaagatgctgattgacaaaggaaactgagaactggacatatgcattgaatggtgtgaatataagggagacagcttatgtccggatacccatctgggagagaggatgaggaaatgctgagtaggccatggtaaggcaagagaatggcagaaagacttaatcatgggtgttataaaaattacttaggagtggtcttaaaattactggggatatttctctttgattagagttcactaggctggaatcttcataaaagcaggggctgtgttcccttgttcattactgtaactgcagcaagctcagtgcctctgcatagaaatcacccaatacatgatgttggcaaatgctcaaatatttgttttttttaaactcaatttttttaccttaaatatttttttttacctcaaattcctcagatatcatgtgttttccttgactctgaatattacctccatgcatataacttaccaatgtgtatgtcctaggtctgacctctcttctgagttccagtcccagatttttagctgcctgttagacttctttacctggatcacttggaggcatctcacattcaattaaggcaaatactgaacttgactcacattttccaccttcccattctgtcactcatgctttcttctttgttacagatcttataatggactctcttctagtctaattttttgtgtgcatgtgaatgtgtgtgcttgtgtgtgtgagagcctctgccttccatgggggagtcacaaatagtgaaaaaggcagtcacacatagtgagaaaaggcagcgctttcatagaatctttatattcccactatgccttatgctgtgcctttcatgtagtcacactaaataacagtttggtttaaatcagggtttgttaacaagccatataaatttttggactctgccttttagcatgtgaaagacttgtgaagatttcaaagacaaataagaaaaagtatgcctaacgaggtgtatatataaagagagttaaaacattggtgattcttgtatggacagaagaaagcaggggatcatttgataataaacctacatttctgttgtggaaggaggtgtaaataaatgaaaagccttctttcaagtctatgaagtcttatttactgtggaggcattctaatcatttccccaatctgaaaggactgaataagcaggagagagaggagagagttggtctggaaatattttccccatggtgagcatagctctaaaggtcaatggatggactgatgcagtcagctggtgacacttgaatggccttacccagctggcatctgttctgattgattagcgcttctgtgctttagattagaagttattattgaaatatgtgtttggctcactttgaattcttattgactcagttagtttacgtttcatttcaattctagattttccatctctgtttcatacctctgttgtctcatggactgtttaaaaactaatgctttccttgagtaagattctccagaatgtcaggcccagaagttgaatttgactcaacgtttcctgaagattggacttctaaattaacactaaaagtttccgaagatatgttttttagttacgtcatcagcttaatttgtaacccttttcattccaaatacatctctgaggtaagtcttctagcacactgacttttatttacatttaattcggaatattcttagtgctgttaagacacctttttcataaaaaagacaatacattccgtccttatggttggcagagtaacaccatctgaaagatgtctacttcctagtccctagaacatttgtatatgtgatgttacatgacaaatgagaattaaggtaacatatgaaattaagattggtcagtttactttaagctagagagattaacctggtgggctcagtgtaatcacaggggtctttatttgtggaagagggaagcaggagagaaggtcagacttgactggccatttatggttttgaagttggaagggaccaaagagctaaagaatgtgggcaacctcttcagaaggtagaaaaagcaagttaatgaatcctcccttggagcctccagaaaggaattcaggtccactcacatcttgatgttcacctagtaagatccacgcctgacttcaggcctgcagaattagaagataataaatcagtgttattgcagtccactaagttggtaggtaatttgtaaccggagaaataggaaaccagtagaacccttctttatttcagtttggtgatatgaatgtgttgcttcttacattctagataccaggcatttataatttttcctagaagagttagcctatttttactttataggatcaagggcaaccatgtttactttcataaggagtaattttttttacctatacaaaattggataatttgttttgctattgaatgtgattatatccacttttatcaatatataattattatctaagtacattttggcataactcactatatattttatataaagtcacctcttataacttgcataacagtaacccaacatgcttttgagctgtaaaaaggagaatatgttcgaacattcttgtttgaatggtttagtagttacgacattggcattgttaggaatgacaaatagtcatttcctatttggtttatcagggaacactatttccttggttgcaataaatgtccatactgtctattggttttcaacttttggaatcaaattatagagaaagtatggttatcattacagaaaagaatgtaaatatttgcaacttcagtagcataaaagtaaaggtagagccgacagaaatgggaagggaaggggtggaaggtgaggaaaagagtaagggctgccaagtcctcttttactccgaggaatgaagagatgctgttttagatgacagaataaacatagtcatttattaaagataaaggtaaccactaaagggaataaaaatatttgaataactctattaatggaaaggatggaaaagttgggggactctaaattcactaagttcccatgaatgatttcagaaagtcaaaagatgattctgaagttgaacggttgggacagtcagaaatgcttattatttagagaaaaggtgttaaaattcaaaaagactaaaagatctaaaagagttgcctctggagaatacagaactgggccactcttctgtaccatttaattttttaaaatcaaagtaatgcttacacatggtttaaagaagggttggcaaagttatctgtaaagatctagaaagtaaatattttagcctttgcaagccacatgacctctgttgcagctgctcaactctgagtttggctgtgttcccttttatctttatttacaaaagcagtgataggtaggatttggcccatgggtcacagtttgccaattcgtttatagggtcaaatagtgctaaaaggcccatgacaaaaacagtggtccaatggccccctgccgcccaaaccacttctaagaagcagtcactccaaacccttcactctaaaccccacaggttttttctatttttctccataattctaataatgtatgaatcaagggataccagtgtgcttttatgtctaaatatgaatttactgctattccttggttcatcaattttagacattttctgtttacatctgattaaggtagttgaaaatactagctattttatagctataactcaagctatacgtttttttctccttgtttcctaaaattattgttaggctatttggttaaatgcatattcagtgtttttactgttatgagaatgcagctattgttacttttgagcccataactatggttgccttttgtctcgtgcaaacttttggttttactggagttaatgactttatttgcttagttttcattgaatctcatgctttttttccgttctttttaatagttatgtaaaatgtctcttactgcaatcttccactgagttaaaaccatcaaaaatctattgattttggactttttcctaggaacattgctcctggagcccttcttcattgtcctgatcacatcaggattggtttttctctaagccttgcatggttatgttaattgctgtcaccgtttatctgagaattcccttcccatctcttgtgtgttgggtcctctgttccctgggtccctcattttggtggagcacattcgtctaatcacctgtcaggagtgactgggaggagggttgagtgtaagcctggtttttactttgctggcgttggatagagtagcaaggttggcatgtgacccccagtctttagtctgtagccttttacattcagcccttctctgtgcctgatgtcttagagtctggatcttgctctttttcagtttctccagagataatatctcttgcctctcgatgagtgagatggtggggggcacctacctaggagtgttatccttccttaaagaatttgtcaggcagcttttgttcaccattttcagcccccaccttcgtctacttttcatgatacctggggtctccagaccctgtcgaagtagataggcttgtgtttcatgctagctctcttcattggcaggaacttggatttgaccttcttcccctctgagaagtcattacttccttgtctttccttttcctgtctgcatgttgtgatttgagttacagatatctgctacttccatgaagatagagtttatggttttgtttcttaatttccttgtttggggatgattttcagagaaggaatgagattgtcgtaatgactgtaactgtggatgtgtgttagctgataatttttaaaattaaaatatttctgtatctgcagttttcaaaacaataaagatgaaacttattttctttcaccagctaaaataaagacccacagtcatctcagctttggggttatattaatatgtatgcatgaatgaatatattcaaatatatatgtgcatgtatgcaactgatagtgtaatataatcgtcggaaaacttttcctcaacattttgattatttttctataatttttagcatctttctttataaggtgaatttttagcttaatattgtgttgttgtttacttcttacacaattggcattcctgcttggggcttccctcccactgtatttataacttagtagtgtaataatggtataatgatacatcattgtaggcaatactacattgtttttcatgtcttcatctaccttctcattcgcattcctgaagtagataaggtgttacacccaagggaagctgttagcttttattagcaggctattttctgaaaagttttagctaattgtttttggagtttggcttgccttttcccatgtaaagaatatttaaatgaaaatttgtattgtctgcacaggcttttcatatgtcaacattttgattaatgtcaatgaatgtgtcagttaattatgaatcttagctaaggcactggacatgaagggcagatggccagtgtatccagaaattctcaaactgtttgtgatagaggaccagattgttttgtttgttcatctatggcaaacagatacttttataaaatacaaaatcatgtgcatgaatatagcaataaaaattgctataaattttaaaaaatgcttactcccaatttttgtatttttgttgcaaatgaaaaacaaacagtttcatggaatgcattagcctacagactacattttgatccaggcataggaaaaaaattgggaagagcgtttcttcccaaatttttgacgtgtgaaaaacttgcctaccattctggtgcttctctttctgggccttttgctcacttcctgctgattttattctttcccaagcccagagggtctctttgccctcctaactgctcattagcttctagttttgaagaattatgcagagtagtaataatcacaggcgctgtttattgcacatctattgtaagaagagtgcagtgtcagatgctgggattacagtggcatacacatcagaaatggcgctgcctttggaatgtaagagtctgttgtcaagaaagaaaatatatgtatgtatatgtatgcccgtgtatgtgaatgtatgtgaatatgtaatgaatttctcacaatccagtgagggtagaggatattgttcccatttatgagtggtaaattttgaatttcagcctagtcttactttaaagctcatactttttccacgaagcattttggggagtatgctgaattatcctatttatgtggcacatgcccagccaatcctgctgtgctgtacatcagcagtttggaaaaaccatctgagatgcaaataacatgtaagtcccttcttcttcctttctagaagtattttcttttaaaagaaaaggtacctttaaacatatttaatgctgatgtaaaaagtagtagaattttatttcattttgtagagtggaataaaaaatttactcagtgtggtgcaagatactcttggcaagggtagagaggtggttactaccacttggtgtttttgcatctccaccaagtttattcaacctgacaagcgaactagttttcccactctcatataagggttgcttttctgagctttgacttattttacaaatgactgcaatgagacttgccctggggcacagccatttgttagaagacctggctccccacctccagtctgccactgacttgcctcaagtctgtgctcaaatgccactttttcatggaggccgggcctgaccccttatttaaaaatacaaactgcctgtactccccatcctcctcatcctactgtattttatctctcaaattgcttatcacttactaacatatcattaattcacgtatgtattttgtttgttaattattgtcttctcccttcactaaaatttaagctttattccttccaagagctggatttttattctcttttttcttagatgttgcaagaactcaacacatgttgcagaaaggactgccattgacctgcagtctacagtgtttctgcttctcccatgctgcccttgtctatatcaaaagatctaagtctcaagatttgagcttttactcagtatcaataaaatggctttctctgttataccctgagcccgtccccctactttcttactcctttctgtttctcattgtcttcatttgtatgacaaatgcataatgaatgtcagaagtagtgctggggatatggaagtgagtaagataaatgaggtttctgaatcatggtgcttatgttctagttggggcagactaagccataaaattaacaaataattgaataaaataaggataacatgatattgataatttatgatacttccagggaatcagcgttagttaggtcgagaaatttctctctgagtaggggatacttgaggttagctcttcctgctttcttctctgcattctctgtattctttttagctatacctgtgatccctctgcagcattctggaggaatgaagttgttagagaaacgcagctaacagtagcaggtagtattatccccaatcctttttgaagatcagaggcaaataatcccttactattcctattactgccacactgaaaagaagttttataaacagtgtgggaggggggtgggtgttggcgggaggtaggtggttgcagtaaagtggatgaggtctttatgtttgtcttagagttagtttattaaagttaacttattttataaacacggccgccagtacctcttctgcaataaattaaaattctcctttctgtgtcttaatctcttctttgattgatccataaaactgtgttcaagtgaagagctaagggccattattgttacctgtaaaatgctttaaaccttactcagtcattcatatacacaaagatacacacaactggtagacactatctgtcgaaagtattctttggagttagcatacaaagatgccaacgttatagcaccaagaaagtttgaattggagatattaagtaaactgtgagttgtacaaatttgcattctcaaatttattcttattaaaattcattttgtagcagaatgttttttagggctttataatggaagaattattctaaaaattaatagcttgctcttctctttggagagatggctccttccactttttaggtgtaggctttgaattcctctggaccacacaagtttctaaaaccttggcatccagggctttggactataaaatttcattggaaacaaataatggaaaacaggatttttaaaaaatcagctgttttctttaaaattactttgagtcattgtttttcaatattattaaattagtaatggttcagtgttttacgtctttcatactgagaattgtttttaaatggattaaatccatttaatctgcttaagtatatttgcatcaattatgcattaaatatctttaattttttttaatttcagacttttaacgtttaattttcctgatataacttcagttttgtgattatactgtatataaacctgaagagttacataaggcctatactttcatgcatttaagagtgagcctttaactcactcctagagctgtaggaaaatgaaatttctatattcttataaagtcagtgtcttgagatgatgtagacagtacatttggaaataattaaaatttgttctttattaaaaaaaagctctatctagatctggaccttttcttctcaaataaatttagattaatcctaaaatgaaaaatgaacctctaaagccctttatataaagaaaaccgctgagattatagttacttcacaaagctgaatgaaagtgacatgggttaattaacattcctttaaatatttagctgatatatgaactaggaagtgaaatatatgtctcaatacttaaatatttttctatttgaaaaagggaataagtaatattattaaaacttagattatgagatactgtagaaacaaattccctggaattgttggtgcttttatattgcaattattttgtttagaattatacatcagaagaaaacaactattaataccttttctatggcttaacctttgttaagccatactggtttatacataatggtttatactggttccctgtctttaaaataagaggcctattctcggtggtctctgagccaatgaattccttccagtctttgaacttataaatttactagtcaaggcttgaaaattccaagtattttttttggggcggggggtggtaatgaggggaaggtgggaggagaactattttagagtgagaaaacagcctattcaaaaataatgttcaaatcaatataaaattctcaggcttttttttcccccctaccaagagtatttcttttaccttggagatgaaagacctttttcttaaatttgttcataaattaatgaattttcaggctacatggcaagacattggaataacgggtagattggggaattcaaaatatgatgttttgttgaatagactttctgcttggggatgcacagtaacaggggaatcctgcagaattgccgaatctattattcctaccctacagcagagatttcctctttcaagagctcaaagccctaaggatctttgaggttctaggtgctgtaggtctgagagttggaagggatcttcaggatcacagaagttccacgtcttatcctgtagcatccttgagatacggctatctagcctttgcttcactcttgaaagatgtagagagctcatgtttttaccatacatcccattctactctatgattgttttttttttttttttttttggagacagagtcttgctctgtcacccaggctggagtgcagtggtgcaatctcggctcactgcaacctccacctcctggattcaagcaattctcctgcctcagcctcctgagtagctgggattacaggcacgtgccaccacgcccagctaatttttatatttttagtagagacagggtttcaccatgttggtcagggtggtctcaaactcctgacgtcgtgatccacccacctcggcctcccaaagtgctgggattacaggcgtgagccaccgcacccggccaagattgttctttttgaaggatctttcttacgctgagtttctacctctctatcgtctatgtatcatttctagaacagcacagaaaaagccaaatctctcttttatgtggaaggcttttagttggattggagatctcctatggtcatttaactctctgctgttacctctgttgtctcagttctcatgtacttatttacggaggtctaagtgtttaaggtaaaacttttacataaaatatagtctccagtgtaatccagatacttcctctggtgctcaactgaaaagacaatgaatactccaagtctagattaaaaacaggtagcattggccttattcagaggacgtatgttcacttccattgtggtgtctccctaagggatttttaggactaattttaataagtaatttttaccttacctgataactttaagagctcagtgccctgtaaactgtagttctgtctttgaaatagcaaagtgttttcctttttgttctccaatttagacaagcctcaattaattcagctcactcatcataagatgtatttccatctccttaacctttgtggttactgtcacatgggtcatctccagttagttaatgatggtctcttcaaatctgacaaaatactctaaatgtagtgggaccactttggcacagagtgaaacgattccttgttctgttctcacacagtccttgtattatcatagcctaagatggtaataataatatttttagcagactcatcactgttgacttgttaaagcctgtggtcaactaagcatctcctgggcttcttagaaatgttgaataactggtagtcagttagctacatgttctattggtaggataacctggccttcccatcttctgggacttctacactccttttgttttaggatttgtccttattcttctgaggaaactagacttactctgaacagctttttggtggtcttcatttgtttagctgtagagatggcatgtgcaaaaggaacaattaggtatttcagtttgaaaaagtcacatttttggaagcaaagatattattttcatttttatgtaaataccttggaagtatatcacacgtgcagaaaagtacacaagttaagtatagctggtgagacaggagagtccctgactccctcgcaggacttgcgatgaggggtggctcctttgcagccgagctcaaaccgcttgtgggagggggagcacgcaggtgagcaggtgcaggacctggggcaagtgcctttaggtgctggcaggaccaaacccagtaaccgggcccgtggtagcaatcagtggttgcccgcaacttctggagccccagaggttgtgtattacaaacaatgcccttttggttgttgccttcaacagagagctaagccttaaccagctcagtggagagtcagggtgacatataccctgccctcttggtacccgggttcttgtctggcatccaggaagaatcaggtcacacggacttgaaggatgttgaatgcagaggttttattgactgatggaggtggctgtcagtggaaaaggagctagagcggggatggtgcgggaagaaagtagtctttccttgaagcctggctgactccagccgggtcgtctccgaagtcgtgtggtctgacattaagccgcgtctagccttagtctctgatgcgcagttgcttctagtctctgatgcgcagttgcttctcctctcgatgttcagccgcttgtctctctgccagctgagctctgaggtttataggagcacgagatacggaggctgggtgggccaaaaagtagcatttgagctggaaaacggataactgttttcatttagggctgcagattccaggctcgagggtgggttctttgccagggagctgccctcttctatccagtatttccctgcctcctgtcggtatcgctaacatacagatcaagaaatagaacattgccctagaagccgcttcatgcctctttctactcaccacccttccccctcacaaggagtaaccagtctcgtgacttctacattgtgaattaattatgcctctttttgaacttgttatgcatgtaatcatacaaaaggtgcttgttttgtatttggctctttttatgcaatttcatgttgcgagatttactcatgttgtcgcataaacttgtagttttgttcattcttgctgtatagtattccattgcatggacatactgtagtttatacattctactggttacgaatatttgagctatttccagatttttaggtattaaaaataatcctgctatgaatattctgtgtgtcgtttggttaggtatatattcatagcaggatttgatatatacccagatttctgttagatgtatacccagaagtggaattgctgagttatgtgtgatgttcattcagctttatggcatgtttatgttcagttactgccagttttccaaagtgattgtatacatttacacttttacccttagtgtactagaattctagttgctttgtattctcacaatccttaccctaaccccagtcaatttggacaagatcaatatcttcacaatagtgagcttttcaatctatgatagtcttctttaatttttcctaatattttataattttaaatcataaatgttttgcatattttcattagactcattcataagtatttgattttatgctattgtaaatgttacaatttttttttaattttttttaatctttaactggttttctttgtttagttattggtttgccttatttactaagatacttctatactgtgatttggtggtgcctattctcaaatgctttttctgcatccattgtggtgatcatttgatctttatcattttttctatattaatttatgaataacttaggttgatttttgacttttaaataactcttgcatgactgtaataatttccacttggttatcatgtattattccttatagacatcactgaatttgatttacaaatgtttaagatttttacctacatatgtagatttttacctacatatccatgagaaagagagagactgggatattattttcttgtaatatccttgtaaggatattggtatcaaatttatgctatcttttttaaaaaaagctgagagaatttttctctttttctagtctctagaagtatttatataaaagattggcattatttgttccttaaatattaggaagattttacctgtgatgtcatctgagcttggaattttccttttgaagaaacatttggaaggttttgaaacaataaattcaatttaattcttgttgtttttgtattaatcatattttgtatttttactgtccattttgttgtatttttcgaagaattcgttcattttataaaaattgttaaatttataggtccaaggtttttagaatattctcttcagtatctgtaggatctataatggttttgcttgcctttgttccttcctgatattggaaatttattttatttttcttgattggttctgctatgaatttactagttttgtcaagcttttcataaaaccaactttgatttttatttgttgtttttttatttcattgttctttgctctttattttcttcactgtgtctttggatttcattagctgttttttttctagctttttgatcaattttttttacttgttaatatgtgcattaaagaccataactgacacatttggcactgatttacctgcattccacacatttttgctattttaattactagaagtattttctcattgcctttatttttcatctatggatttttcagtactgtatttcctaatttccaaacagctgggcatttttgagatatttttctgtggttgattctactgtgataagagaacatattttaaatgatttcagacctttgaaatttggtacacgttccatgtacacttataaagtatgttctaatcttttcggttacactatttgtgtgtgtgtgtgcaaatataatacaaataagttaggctacatttgttacttgtgtcagtcagatgatttatatcttcttcaattttttgtttcctatcaagtctcccaattcatgtttttaaaatattttttaaagatctgttcattttgacagtatatgtattaaagttatattattgggtacgtacacatttaacattgttatctttctgttagattgagccttttatcatgattgaatatcccactttatctttattaatacttctttccttgaagtctcctttatctgatattaggattagtatggccataccaactttcttttgatagaatcatagatttttagatctggaagtaaatatatgtatggactaattctccctcattttatatgtaattaaaggtttataattctattggacttgctaggtgttactttcaacccagcataaaaactccgggtcccattctagttctgctgaattctttggaaacatactgtagttaattcaaacagcctcagcccatgttcttctactaggcttttctcctgaagtttacacttggttgatctattttaggaaggtgaaggcgtgttctgaagccagttagggctggttcataataaactgtatattcatcactgccttttctggcttgattctttcctttcacgtgtcagtgctgctctgctaggctttgtttgggtgtcattttccaaaactcttgtttttccctgcactgctctgtggctggctactcagaggctcctgttctctgtctgccccaaacagtctgcagacatgctctgtcaccttctccttcctgggtgcattgtggggcatctgattctcatttggtcttgggtagaggggagaatgcccccaggagattattataaaagtaattaagtgttatgtgcaagtacatttttgtaattctctatctaatttctggtgcttcaaactccctctctattcttggcagtaagatctttttccactgtttccaaaacccttaagtctatgattatgaagattatattttgaaggtttccccacttaattctcatttgtgaagcatgggacagacccacttaagcaaagaatttggggccttccattgtcaccccccatgtctctgcattttgacctctatgaggtgcatcatacaaaaggccatccagtctccaggctcactaatgatgatgcacccgaggcccagaataatggcaacttgcctgggtacgtatgcttatgtagggatagaaatggacctgattccctgcctgattccttggtaattgtgctttgtattaagttatttaataacaaaatattttctgtgtttaaaaaaaaatcccaccttggctttgctgcttattcagtgtctgaacttcggaaagttaattcacctaccttggttttctcatctgtaagatggattaactgttttatgaggcattttgaggataaatgagttaatcatacaaaacacatagtacctatagtacctgacctataggtaaaatctcattttgtggatatgtgccaccaaattcatgaagttaaattctataaagaaaattccgttttgtttttaccttccatttgaccattgctgttgtgttccagtaggtaagattcttctagtaaaaacattaagccaccaggaaaccagttgcatggctgagaactgtaattcatgtagcccctctccaaaaatcggcttttcctttgcagcactctccccactttgggacctcgctgccattgcaggctgttttttcttcttggactacaggcatcttgcttgggcccctccaagttttccctttcttgtgtttattggcataatcccagttcatggtagtcacagcattatagtatgtgggttgccagtctactcctttaggtattacaagtggaaaattattgtacttcaaacatggttaatgtaaattttctaatgcataaggtaaaatttcatgtcatctacccatagtgaaggtcttttggtgctattagtattaaagcctatttggaaccatttttacatttgatcattaaaaataactcttcttcctgtaatgcctgtgtttttgttttgctttccttttgcaattcattctcataggctagttttagttttaaaattttagtagcatttaaattaactcttttattttaaaaacagatacaataatgtcaaaagtggagaaaacataattataacattatttttcaataatgatcctaggagtataagtaataagacattgcatagcaaaatgaacacatatattagagatattttcaaaataatttaaaagctatgtgtaccacagttacttgtgcaatataaaggcaagttaagtgtcataatcataaaaatatagtaattttttcccagtgacagtatgaaccagaacacatatgtgaacaccttttcatatctgatcagttttattcctgatggcaataaaaccatgtaaatgaaatgcaaaatgttgactgcaatgtaatggttgaaatttttacatgcattaaagagtcaggataaatttatggtcttacgatggctgtaggttgcatattttgtatgtacatttttgagtgatcaatagcaccatggccaaaataccatggggacaaaaatcacagttggtatgtactgtggtttattgacattttgccccctctcagatgtgtaaaatattaaccctgagactgatttcctatggcttgtctgtttttgttcagggttaggtgtagatatatgcccatcattagcctactcttttcttctttggaatgtataaaatggcaatatcaatgtggaatagggagttcaaattgtagtctttccatattctgacaccatgtttttcacttaaaatttttgggtcaaatacatgtttccaaaatgtatcaagatacttttttacttcatttagttctgagctcttttgaatcaaattagagaacagtgtcttagtttcaactccgtgtcttattttccacaatgtcttggatcccagtgtgcgtgagggaggaatggatgtgatgcggcaaccccatcttgctgccatttgtttgatattccctttgccactgatcaaatcctatctttggctattttttgagttactttattttaaattaggactctttggttttcttctctctgtgtttccacctctaggcaggaaggtgtactttaacttactgcagttgtgaaggatgattatttacctccatcgtaggtgataaaatctgcttttacaaactgaacttgagaaaaaagcagataactgatagatgcctgcttttaagtacaaatatactataaagaaaactctttagaatacattactttttataaacatggttaaaatcaacagatttcatctacagagctaggtaatatatcaaaaaactcaatggaagtttatagaaattaattaaattgaactctttttataagcagactttttacaaggaataaataatacttaatatttccgtcagaagtcctgggtagatttgaagaaatatgttgcttgcggcatggccataacaaaaaagatttaattcccaaatattgctgggggagagctgtattgtccagtggccattacatagttttctctatgctaggatcctccctttttgaaatctggcctattatacttagctcatcttttacagcacaattacttcgggttggcaaagacctctggttaaagaaactgaataatgagagttgtgtgtctttcttacctgattatactcccactgcttatatctttgagatctctatctgtgccacagagtcaggcatttaaagtttcctagtaaatcattggtgtttgcacctataaactcagtattagaagtaaacaaaactccttttattttacttgaaattcaatactgtatggagaacttaattttgaaatgtctaaagcctaactaaggagaattcctttagatttttaaagcctatcactttaccaagttgtattactggaaagctatgtacttgggtcacattttagtagctctccaaatagatgccttaaaaaagtattgtttaatagtatgcccttactgtttattgggggtcagctaaaaagaagactgtatgacaaccatttctattagcttttatgaaattgaaattgaattccgtgggttatattagttcttatccctaataaagatttgtatgggaaaggcttagagctgtatcctagaagaatttccatctttcttttttaacaaactggtatctgttcgtttattggataccaagtgtattatagctcaaaagtttcccactttgaggggctttctaagactcacagaaccaaattgattatagcttggggattatggtaaaaccttactcatgtttttcttcacttcattcattggttcatgttcttgtcccatcgctataatggttcactttcatagctatcctggaaataggcagtacgtaagtaactgaatgagctagattatttaattctaaattctagaatcagagtaagcggtttttaaaagtaagcagttttttaaaaagcgatagttgaacatctctttaattactaccccaactcagtgaattccccattcaactctgaacacagtttgagttgctgccatgctgcaggaaatggcaagcgaggctggagctcctgctctgtgcatcattgcatatctcagagtgaggctgcatgctgaacatggagatttaaacaggtgaagatgttggtggctacccattccatttatatattttgtagtgatagctattaccatcacagattctgcctttagggttttttccctacagctttggaatctgtttggacttttattcctagtttcagaaagtaccctcaagaagatctttcttttccagagtattcttggaattacctgagttgtaggttataaaaattccctgagtatgtttttcaaacagtttatttttgcattgcaatttaccttccaggaaaattgatgaaatatgtataccttgattctccgatttaagttaaacaggataaaaatgccaagtatttttttccaaataaatagataacatttgttttcagtgtttaaaaatttgattactagaacatatttttaacaagttaacttatgtctcttaacattaaaatgtgtttaactttttaacatagattaggtcattaaacttgtgtttgttctactatagggtcctggttactgggtgaagattcatcacttagaatatacagatggaggaatcctggatccagatgatgtcttggcagatgttgttgaagataaagacaaggtagataactctaaaaatgtgcctctttgttttcctctacagagctgcatgttttcaagagactgaaatccttaacaaactcatgtgtcaattattattaaaagataccatctgttcaggtttcacctggacagcccataaatcaaagttcttcatcagatgtttggaaaaactgtgttaaggtttgggaatctgtttgtgttggcctaattagcagacacttcattcccaagagtttctgatatgtcttaataaattagtttcatatgtgaggctgttggaatcatcattgtcgttgctggctctgtagtttattcctggcccttgctaactattcaactaaatgcctgaggcgtgaatgtgtttcaaagtagagaatacaatggggcagcaagttttatgaagaattacagtgaagatttttctgaaagtagctggcaaacaactatcttgagtgatagtcttattttcactgctacagtaaaaggcactaaattgaatactccaaaaagtttgagcgtgttctgccacttatttgggaataatctcgttgcaaatatcttgttttaatgagatttttcttctgagactatacagaggaaggtgtgaaagtatactatttcattgcaatacacacgattattgctgttgagacaggtttaatactacaggtttggctcctgtcatcaatggctaatgtgttttccaaaaccgaactctgtcagagagatctagctttcaaagtttcttctattatacatctttagtgctgtttgtacaaggctaatttatatttggaaacatgtttctctatattttttccctgtaatctcaggggtgtgtatgtgtacatttttgtgttttacctaactggactggaatataaataagtgatttattaaactcaggtgaagtttatatttttctttttccataagatctcttcagactgttcaaacttacattaatctttgcagacatcttatacatttacttttcatattttattttgtaattaaaacctgttttgctttatgttgttattagcgattttatagtctatttagggagataactaactaagttttatagtctatctagggaaataactagctatctagataaacctagttatctccctaaatagattgtaagctcctagtggacatggacttgggagatttttatttgtgtgtttttgttagtagtatctggtataatatcttacacaaacttgattcccaaaaatacttactgaattaatgagtgaaaaagacagctttactttctacacttgactcttgctgtatgtaattttgatatatacttcctgtttatttagttggtctcagggtaaataaaagggtaactaatgtattattaaccttcagaaccctgaagaagggtttttagttctttcaccctgtttcactttctgcttcttccctagggatcatcttcttcctttgaaataatccagatattttaattgtttattaatgtagaaggcagttcctgtcttaaatttcactgatgtccagaacattaaaatgaagggccaaaaaatggcaagtttaggaaggacgagaagaaaatgtcttaccccagcttcatccaatacctcattactagaaggataagtccatgaacagtgcccagggagataatttgtcccatagagctctcacatttagagcattcttttaaactatctcagcaatgcagtttataaccataatccacttactacacacagaaacagctttattatatgtaatctctgttttaatgggactctaccaccattactaaataaggtaaaaaagtgagataatcagttaaaatcctagctgaggattagtactgcttgggttcggctttaacaattctgttaatgtacttcaatatttctacatgatgcctaattggtattgttctgcagagtttatgacaatttatacttttgatgttgctagaaaaaattgtgttgccatttcttcttcttaaaaaatacgtaagtggcacggtggctcatgcctgtaatcctagcactttgggaggctaaggtgggtggatcacgaggtcaggagatcaggatcatcctggctaacacagtgaaaccccatctctactaaaaatacaaaaaaattacacaggagtggtggcatgcacctgtaatcccagctactcaggaggctgaggcacgagaatcaattcaacccaggaggcagaggttgcagtgagccaagatcacaccagtgcaggccagcctgggtgacagagcaagactccatctaaaaaaaaaaaaaaaaaaaggtgaaaaaaagaatttcttatttttctgacaaccttggtaatcttaagatttctttatagtccatatgtctattgtggaaagaaggccctgccaaatttcattttaccttactttttggcagtttagattaagaagtaactataagtgatgctttgtggatgcttaatgacatatcagtctcactcaggatcctttgaggcggtattgagcttagacaaaataacagttcacctgtttgcaaattggctacctaataatctttggcatttaaaatgtggatagagaacaagtccaaagaggcacggatagatgcacataatcattgtgctaaccccaaaatatctcacctcctaggaaagactctcactccaggtgagaagtggcattaaggaactgttggtctattgcagcatatcaggcaggaaaaacagaaacttagaaagcaggggaggctgggccatttagtgtatggtaacaccatcccatacacttcagtaaaggtagaaactagaggttaaatgatattgtacttcaaattagagaaggctctaacaaagttcagccagtgttcttaagaaatgacttttaaaacttgtgcctaaagtggtttgtctgtggtcttacttctattattcctttggccaacatagtgcttggcgcatacatggtatctgcttgggagctttggttttttaaacttgctttcctagtacagcttccacggggaccaagtctccactgtgttacactacttctagcctatatgtgtcaaaatattattggaacagctttggaatattgcatcttatgataactatttgtataaaatgttgtgctgaaacttaataattatctggttgtgacagttattctcaagattcttcagtttgtctatcagtctgatgattcgagttctttgggataaatatctaagaattgtaattttacactcatgtctcctctctggttgctaaaggctaccaacttagttcacccaatagtaacaacctaatcattgatgactagcaatggcccagaatgtctttggcccttatttattctacgttattttaaagcaatcctgaagacaagagctagtgttatccctatttttaatttccagaataatcacagaaattgtaagtaacttgcccaagatcacacaggtagtaaatggcacaatcagactctggaacctagaatttaaatttctgtaatcttatttcttttcttctctgatgtgtcaagcagtttggcgcttgtatctataatttctattacgaaaattcatcagtcataaattaacatgaattttgcttttacgtagtcaccaccattgctaagaaaaggttggtaatagaccaaactgttgagtataacaaaacagttgagtatacaatttatttataaattaattcagaattaatatgccatacatatttaatatatttcaaccctgtttgcctatagcctgcatctagtttattgtaaaggcttgtcagctctacctctgttgctttcttttgcatcctcttttctctaggacccagattatttgatttagatacagtttaatttcagttggacgctttagactgcacttgaagtctaaccaccatatgcaattacaaagaaaaacaagtttgtattacagtaactacttttttgcaccaactatagactgtgctgttttcagtaggcagagtaatggcgcctcaaaaatgtctactccctaatctctacaacctgtgaatatgaatgttacatgacacagcgtctttgcagatgtgcttaaggatcttaaaatggagagattattctggattatttggatggacccaatgtagtcacaagcatccttataaatgaaagaagaaggcaggagagtattagagagataaatgtgagaaagacacacccagccaatgccagctgtgaagatggagaaggtgccaccagcgaagaatgtagctggcctctgacattggaatcagtaagggaatggattctcccctaaagcctccagagagaacacagtcctgctgataccttgattttagcccagtgagacttgtttcagatttcttaactgtcagataataaatttgtgatgttttaagccattgcatttgtggtgacttgctacagcagcaataggacactaatacatacactgcctcttttcccattttaacttttaaagtgatgttagtcttctcaaatttcatattgactgggcattgagatcctgcaggatgagataaatgctttgtacttcagatgggttccttgttctttgccttcctcccaaagtccatcacaaatgatcctcagtttattgggtgagccttcactctttgagacttgatctttaaatatctaattatgctgttatcgtctatagtgtagaaattatttcaaagtcacagacaaacagccttgttcacttatcagtttctcgctgcagtatgtaaaggccctaagaagtctgaagactgatgcttagtaaaccactgcaaagcttaatgcttccttccttttaagtgagcatgagagcttctgagtattaagctttttaaaatgattattttctttggtaattgccattattaatttttggctgggttgaagaagacaactgcaatataacatgaaaacatggcagtctatcacatctattatataaagtcaattactgccatggtttcattaactgtacaaaagtaatactgtattatgtagtaaagtaacatggaaagatgcctctgttcttgactaaattttgcctatcctagggggctagtttggagagatgccagtggttttcagggcttccaagtgaattgcccactggatcacatgtgatatctggtattcaaatgttataatttcagttcagttttatctcctattagttatcagtccttgggcaagcttcttcatctctctggtcttggtttccccatttgtaaaatgaatataatgttcttacagggttggtgtaggaaaactaggtaggtaaactatataaaattttaagtatagtatagcatatactgagaactcaaatgctgttatattaatgatactatggtagtgctattacagtatttttaatgtaggtgttttgatgttaccattagatgtttttaggtatttaaacatcaaataaactattttactgtatattttaactgctttttaaacaaaactgatatgaatgaagttattaaattggtaaaatagttttataagaagatattgaatatgacagaacatttggattaatatattgttattatttgcgaaatgaaaatgccagtatgattaaactggaaatgagaatccttttatcagaacatattatttggtaacataaggagcatttggagatgtaacatgattttaaaatggagactggtttgcgcaatgctgcatgaactagtgacctaaagccaggctctttattcttaagccaaattgctttctgaacactctgttgccctctagtgggtccacagttacctagaaaccagctcacaggagctacttcctgaacaggatgaagtattttgttctactttatttgaaaataatttttgctatgttttttgttacaactcacagactcaggcatggagaataaagccagagtttgcatatatttccctgtgcttttgtgcatcttctagtaagggctaaaggaaattccttgcatttataaaaactcctcttttaaatttatttttaaatttagacttcttcccgcctacctgtttgctggctgaaagattaatggctggtggtgatgaagtgtgtaacttattcagtctgtagttggacaatctatgaagtatattgtgttttctggagaaggagaatgctaaattaagttaaacagcttttttttttttaaaggtcctgatttatttcatttcttagccctcattttatcagtaagatttccatcgcaagctaaagtacctattttaaagccacaattaaaagaaaaacaaatcaggatatgatgtgtttttgtttttccttcaaaaagtcttactttggttcatgggagttgatgttataaaagcacaaaagcacatagaagaagtttggagaaggtttcagaaataaatgcagaagctcctgaagaacaaatgaattaccttggtcatgaaattttagctcagaattttcaagattactctccgcttatagaattacaaaattgtagaatcatggatccaaacaagacctcaacagtcatgtggattaaactcatcatctttcaaaagaggaaatatcctacccaggaagaggttatagaacacgatgtctgtagctgatttagttcctgagtccatttctgcatttcctccctaggatgctgataacatctcatgcagatcaaaactactcagtttgaagttggcttcctccattgacatccttgtttttgttggttagtttcaagttggcttcttccattgacatccttgtttttgttggttaggagcaccttctcctagtctcccagacttgaacttgcagttattttaaaaatttagttatttaataaagccaatttattctttcctttatcctttcccatatgtttgtttttgtctttgaatttccacagctaccaaatttatatccataatatttcaggccaaggttactgtaattgacaagaaattggtcgtcttgtttttagtctcttccttacctgtcagctgtttttgtgcctcgtatgtaggcagaatggttaagatcttggattctggacaaaaaagtcagttcatttcttggccctgttatttgtctagttttgtccaagttgctaaacctctttgtgccttagtttcatcatggataagtggaactaaaaatagtactaattatgtaagttaacacgaagtgttcaggagagcacctggcctgtagtaagtcatcaattgttattgtaattaacacactattaataatgtaaattacattatttaaaaagtattgcttaaatcatattgttccttttagtgtatactgcatcaagtccaaactttgtagccatttagaggcctcacaatgcctccaaactttctctaaacccacttcaaccgcagtggtggcgaaactactgtacgatttattatgtatcatggactttctagctccaaagctttttttcttaatgttccggttgtctgctatatccttgtccctatttcctgcccatcgaagattcagtttatgttgtattttgtattattcaatattagctccatgaggagggggtctttgctttattcactgctgtattcccagtgcctgcagcagtgcctggcatttcctagctgttcaaataattacagtcaatgaatgaacgtatgctttgaggttttgaataagccattcaaccacttgtaactccagtttttccattggtaaaatgagagtgataaatgatatcgttcacatcgtattattgggaaggttgaaaaagtgtgcaggaaaatacaatggaaattacaaagcactatatacgtgtaaaaaatgtatctattcctgctgttcagttcttatgaatttttcaagatcaaggtgaaattgtattttatcccagtcaacatttgtaaatcatctcaatctaaagtaaatcctctgtgctctgaaattttatagaaacgattaagtggtctttttttctttttcaaatgttattggctagtaacatttaccacttaccatctcgaagttcttaagaattttattgtttaactttttaagtcttggtttgtctgtccaggtgtcttgtgtgctgttttaggactgggatgattgtttaaaatattttttagcccatagacttcttacctgtagttcagtgtttcataaacatgtttaattttagttagtgatagagtgggaactagaattgaagatttctaattgactacctttttcttccaccaaactacgttgtctctttgaaatattttattaggagacagtttgtgggcatgtttcaacctcagagaagaattttggaatcaatgcctttgtgaccttactatagctaaggcaaatagtgtcaagagatagtaacttaaactacagtaatcttgatgatggccatgtcagatatgtgccttccgcaatttagttggttgacaactatagtgtgtatgggtgtatgtgtgtatgtacgtatgatgagagaatctgtgcacagatgtatgtatgtggaggagtgtgtacacttgccctgaatttgtttgcttgttgtgtacaattgtgacacacaggtttcatcagaggttggaatgacatgatcaagctctatggtattattaatttagctaagcatttgagtacagtgaagagtaaaccataagaaaatgtttgatatgtgtgtaaaattttaagtttggttggagggaaaaacccaataaaatttgagatcacaataatgctttacttagagctaaaaatgtaattcaaaataagagtcaatgaacactttcatctttacagtatgcctttcaccatatgttacattactggacccagttctaccaattttctctctcacattagcttcttttgaagctatttgtataggcatatctttggcctaggggtatgggaccattatttttttttaatatacatctgtttttttacttatgtaacttacgaattacaatctcattgtaatacctaaaattataccaaatggaagactacttaagctataaaacatcttcttttaaaaatgcaaatgcctgtgagtactagtgtcagtcaccagtacctgtgtgtattgattcagatcgtgctccactaatacctagctgaaatcagcttcactaaagcagtattgtagagtgtcatgtggcagagcacagggcattgacagtttgaatgtaggtttttcttattttaagctgtctcaacctcagttctcatgtttataaagtcagcttttaggaggaggatcaaatgaaatgaaagagtgtgtggtaacattttgaactgtgatgtatcacacaaatatatcacttttattctttcctcgtgtagcagcagccctgaggtatttaagcaaacatttctgcatagcccagaaagggcttgtggtggtatgagaacactgagccaggaacagaggaatgtcagagaggtttggaagggaggaggatggttatgtcaaaaggccactcttctcttcttgccatctagtgaggtgttcaggaaagagttagtgctgagagtatagggagaagtagttttctgaaacaaaaattgcatttttctttaataagtgaatgtgggtggtaagaagggatatcagaacttccaggtacagaccatcaaggaaggtgaaaactaaagtacaaggatagttgttcagaatcttcccaagattccagaaccttgataacgtctgcataggttatcaggtatcatgtttgctgcctatttcttaatgagtaacagcgggttctataaaatgggaggtgggtgctttgaaacaatagggagtatcgggggaggtatctctatcttaggttaggaaaaatctcaagaaataaaatggaaagttgtgagaaaaacagctgaccttccgttaaatcatgacctgaggtctcatgatttaacggaagaaaaaaacggaaacaaaaaacaggtcaacaggacactgctcagtatgggcaaataaccactgaaccttaaacaagcaactatttagttacttgatagtttcaccaagagatatttgctattgagcaatttaatgggagtaaccatataccagactcttaatttactatgctggttctcctatttccaggacctaaactcactttatattattaattagccatattgtgaatccaacaagacgtttttgacttctcttggaatcaaactgatgtttgtcacacttttatgaggtacctgttccaaattctatataaaccgcttgtacttatagatacatttttagtaaataagaatattcagtttccttaagcttaggcttttaagttgtagcgtttgaaagtcctataagtatttaatatcacatttagaaagaaagtgtgttttccctgtcatgtgaatatggaaacttcacttacagaattgcggcaggattactaaacttaatgtttactcttttaactttttaagttatctttttagctttacttcgatgttatgaatcagttttgaaggatcaagtgacattttcttaacaataaagaagaaagcctccttgtgcagactttaaatcaggagtgaaatagcatagaaacatgttcagaaataatgtcttcattaatctcaaccaaaaccatgttacaattgaaatacacatgtttatacaatacttaactacaaacagaccagaaagactacaaaataatatgatttgagattattctaatagcctaacaatcttaaatatgcatatacttgtgtaaaagttgaagaatctcatagttcttaattgataacagggatagaagttgattttctagactgctggctaagtgtggccactgtataccagttcaaaatgaacccattgtggtaaaatgacgtgttctaaatagttcgccttttaaatgggaattttacagagctcttggttgacttacttggaaatggaagtacctagtgttaagactgaggaacctgggactacaattgagaagagagggttcagagggagcctgctaactgtcctcaactatttgagtgatcatagaaaaggtataaattcattccctattgctctaagaaatcgggccagtggtgtttcaagaaaatctttttcagctgaatataatgaacagcttctcaatgaagcacatgctgctttctaacacaggagctcatcttagtcactgagaccgagtatataagcaagagtggggcagacatctgccaggaattcctcttttagttttgcagtttgattagagacttctaaaggccaactgtcagcctctgaggcatgcatttcagtctggaaatacaggattggcctacatagtccgttgtgatacagtgttgtttgctgacctcacatccgttgtcccctttctccctccggttgtgttcagattctctctcccttcaacttgaagcccatatggttcagtgcatgtgactactcacctgcaagggtgaccctgggtggcccttcgtctgttactaatatttggttccctgtgacagtgattactttgggaatggtcgtgtgattcagtttgtgccaaatatgttcaaagagagatttgctgagtccttctgggaaagatcgtttcatcttgtgggagaaattttctccgaattttattttgttgttatgaagtttagatccatggctgccatctagcttccaacaagagaagaaattcaggttccggtaatctaaggaacatggcgtcagagccaatgggttgagtcaactctcaagaccctcctaacttggaacctccaattacacgggccatgtattgccttacatttacgcctgtttccattgcgtttttctgtgactcacagattacggattgtcgttggttaccctgttagagaagcttaggctctattttttgggctcctctttatttccatttgattaggacatatttgtcctaacctctttcagttctatacgtcattaattggaaagttttcagattgttgttcacatttctgccaaattatttagctcctttctttcagaagtttttgaattgtcaatgaaagaattacacatcttaaaatctggaggggtaaaaatgcatattccagttgtttggtttgcatggcttagatttactaggcaagattaacttggaatttttccatttggtgcgaattatatctttttattttaaagtctttgttatccttgattgttgattgggttttttttttctggaagaaataattaatgctatttaacacatctattaagatgtgtttgtcataaacgctcattatttctattattcattacttcaaaaattatgtattgagagccaatattctagtgactgggaaatcagaaggagttctgtctttagcctttttagatacttaaagtataagtggttacgtcaatgcgtggtcttacagagtaacatagaggccatttttccaatggatttctttaaaattgtagcgttcctcctttttattttaagaacttggaagaaacatttgacactaacctcaaaatgtcgcttcaactgggtgcaatcctatttacatcaagaaactggagactatatttaaagcaaacaaatataaaaaagaaaaaccttgggcagtttaagaagtttctcagaactcagagtgaagtataataatcttttaagttattatccaatggcatgagatcataatgtggttaatactccagcttccccttagctgtgaagaagttttgcaattatcagttttcccaaaattatctcaaaaaataatgaagcccttgacctgacatatgactcttttcttctgactctttacccaagttataaagaagtgtctaggtgcccctggtgtagcaagtaaagcctggagactcccagggagccctgggcccctaaatggggcagactggggatatttcttgttcaccgaggaagtggggttgcttacgcttggacactgaaaacacatctgtgatatattcaatgtacttcatgtccaagcaatataaagacagtggtcctttacattgtgacattgaaatcacaatcactcctttctgaagtggctacatggctgtcaaaatcagggttctttaaacaagcttcagaacatgccactcttccctaacaagacagaataatttggtatatttaggaagattggaggttaagcgagtgagattcccggaggatttgtaagaacactgtagaagtgttgggggtgggggagataaatgtgatgagttagaaaaataagtaatttgcagatttagtgtgctgatgatttaaaaagtgctgtaatgaatgttacaataagacaagcaacaaagaataatgtgatagacaatgatacaataatgtttggggaggctccatgtcaaaggcatcaacactcaaactatttacatgactctttcccaaatggaaacttatttcccaaatggaaataaggaagttaagtagttacaatgatttagcataaaaatggatgaaatattttgcatttaacagagaccaatctgagatgaatcttgtattcttatatataatgcatcaaaatatggaatgcagcttctgactggccaagttaattttaaaccttagtattttttatatgtatatacactaacagaaaatgtatcaagttggtctgttccaagaaagtctaggttgaaaacttgtgtatttcctgccacattgatacttgaaataaatattcaaataaaggtggaatattaaaaatcctgcagtactgttctttaaatctttgctgtttgttagaaatcagaagctaaaattgaaaattagatttattgagatgaatacttcaaaggctgttccctggtatcttaattcaatatattgctttcctctttttccaaaacaaatattttcctcttatttaaacaatgttttcttttattcagctatagcatctgatagcctcatgttactgaaagttaacataataatttgggacttagaaactttattttactcctagttataactttattggaaaatttaattttgtacagtgaaaataattatgtctggaatactctgagcaccatttggtcagtagcacaccttatatgaaataaatagatttttaaaaatttgatagtgtcttcatataaggagaggaatatagctctggattgaatttttgacacgcaatcttttattatgacatctagttgattaatacttcagccaaatcagtgttttatagtatctcttcactgtccattggatctggagctacaagcatgcataaaacctgaaatctgctttgtacttcccatcatttactttggggcaatgccagtgtcttgattatagtgtttgaagtctaaatgctttaagaattcatctaaggcaggacaatttttatacatgattttcttattgtatttgagtgacagtgtttaagaatttcttaaggttaaaaggtggtaggacagaatttttgaataagaggcacttttgtttgttttttcctttgttttaaaattgttaaactgttaactgttaaacccaacactactaaaaaagttagtacttgttaaatgtcaaaaaattttaaatatggtaaaataccaagatgaataccaaaatcatctgcaatcacatcaagcaggagtagtcattattaaaagttgggcatataaatttcttttgtatatgtattgaagcataaatatttacatttatactttttcatacaaaattgttttagtaacatacttttctttgacttaacacatttttctatgtatttattctttgaaagatgattttcaatatgtatttggcccatccttgtttgaatggggatttttagctttagcttccttcctttgctttttccttgaacattttgctataattctgataaatactctatttactgtaattaaaatgtaaaagcaagatgtgttttcagtgtaaaaatcctgggatattttaggaaaaggacttttaaccctataaatacagcatagaattcttgtctagagaactaagtaaatgtctatactcatgggacttattgggctggttgcttacctaggtagctgaatattctgatttctggtgtttggaagaaaaatttccatttgttttataggtgattattggtaagttattagctgtagtttgcttttaaaatgtatgtaccttgaaatacacatatgaaaggtttaaaggcaaatctaactttttttaaatctgaaactctattttaagttgagtgttgttttcttctggatttaactgattttcagcattttattaatgccgtagaattctggaagtattcaccaattgaaaagaatgaaaagaaagtatttaacgatgacttctactgaggaagcaattttattttattattttttttttctttttcaacttttagcttcagggggtacatgtacgggtttgttacccgagtatattgcataatgctgagattggagtaccagtgatcctgtcatccaggtactgagcaaggtacccaagagttagcgtttgaaccctttccctttttgctaccttccccctctagaagtccccaatgtctattgttgccatctttatgtccatgagtacgtgttgtttagctcccacttacaagtgaaaacatgccatatttggttttctgttcctgagttaattcacttaggataatggcctccagctgcattcatgttgctgcgaaggacatgattttattcttttttatggctgcgtagtaattctatgggatatatgtaccacattttctttagccaatccaccattgatggacacctgggttgattccatgtctttgctactgtgaatagtgctgctgtgaacatgtgagtttatgtgtctttttggtagaggatttgttttcttttggctatgtacccaatagtgggattgctgggttgaatgttagttctatttgtagttctttgagaaatttccagagtgctttccaaggtggctgaactaatttgcatttccacctacagtgtttaagtgtgctcttttctttgcagcctcaccagcatctgttgctttttgactttttaagccattctgactggtataagatggtatttcattgtggttttaatttgcggttctccagtgattaataatgatgagcattttaaaagtatatttgttggccacttgtatgccttcatttgaaaagtgttcgtgtcttttgcctatttttattttatttttttctttttttgaaggagtattgctctgtcacccaggctggaatacagtggcaggatctcggctcattgcaacctctacctcctgggttcaaatgtttctcctgcctcagcctcacaagtagctgggattacaggcactggccaccatacttggctaattttttgtatttttagtagagatggggttttgccatgttggccaggctggtttcaaactcatgacctcaggtgatctgcctgccttggcctcccaatgtgttaggattacaggcgtgagccaccatgcctggccaatagagttatttgttttttttcttgttcaattgtttaagtgaagaagcacttttaaatgtgaaaactgttattgttgaattataagattgtaattggaatattcttcatgattccaattagaatttactttattgatactttattaattttaggcatagtgctaaaaacattgcttatattatctcatcgattatttaaaattacccagtgagatagacctattatccccattttacaaattggtaaactaaggctcagagaacaggattaagtggtttgcacacttctaaagagccagtacctgattaagccaggactcaaactcagatctgtcagtctccaaagccagagttcttaaccaccatgcttagacacaaaatttggttttccattttcatggtatttttctggaactctactgtccctgcacttgctcatttatgagatgtttgtcccatgaggctgtatccattatgaagtttatgtaaagataaataagatgcttcttgttaaagagatgggaatgggagaggttggatggggcagtcaaaggaagtgacagctagtttatttctgttactttatgctcttgtaaaaatacagaaaagattgtgaatttctttacttttatgaaatgttttaatttctgtagagttgccatgcattattcaagattataaaatgatttgaatttcaggagcagacagattttctgatgaggatttcaagctgtgtaattatgaaacccatataggttaaaagttcagaactcgttagcttaatcattaaaaaataaccaattcataagcatggcatttcattttagaggggtacagttacaatatcatttactaaatgacccttggattctgcttcatgtcccaccacacactgagaatgtacaccacatagtttattctatgttattgtataatttataaagaaaattcatattttatggtagtaaattagatgccacaatgtagggcacatttctataatttttttttaaagttttcttggcaccttaaaaattcaaggaagttaatgagtgccaaatatcaaaaaggttaattagaacctgttacatagtgttgaagtatacatttaggaaatgatttgtcaaatttttccagatatggcataaatgtttcagaataaaatataagaaaatgagtgctcaggtatgaaggaaaatttgtattgtgctaaagtacacctaaaatgtaccatcttcatcatttctaagtatgcagttctgtggcattaagtgcattcacattgttgtataaccagcaccactattcatctccagaacttttcatcataacagtattttttattttgaataaaatcatgcagatattattgagaatatgtttggattcatacagatgcttggaatctttaaaggttttaatgtatcagtatatgtaaagatgaacgttgaaactgtagctcttgttacttcaggtaagacacatgacatccattgatgcaactgaaatctttaccagcttttgaaatactgtcagagtcatgcatattttcttcaggatgaaaggatattgagaggaaaactatattcaaatataaacaatcttcataaagaaccatctgaggtgattaaagataccatgatcatcaaacagttaaaggtggaaaataaaatatggtatttatgagaattttgactggcatgaagattttaatgcatattatcttgctttgctaatcaaggtgattgagatgcacttgcctgttaaatagaacttgctcgtggcttttagttatcagagattttacatttatcttttcttcatttgaatgctacataaaccctcccctttgaatctgagggggccactaatttttttcctagagtgctactcttatatattgagaatattttttcccctaatgcttggagaatgataacaaaaaagaattttttattggttcatttcatgcttggtaagattccaactgtcaaaacattataaaattttgaacctagaggcacatttcatcaccagagtactaattgctgcagagaactggagcgaggcattatgtagtagtatttattagagctgcccaattttaatgttttttggaccagagacacttaaataaaaggttaagctgtttgggcacaaaagaaggaagaaaaactgctcagtgcttgcaacacatcaaatatagtacaggaagggtagaattaattgaaaactgtgcacctactttcactgacactcagcatcttattttcagtgatgagcatggcagatgtaattcttggtttattttcactatgtttagtattgggagccgattatgtgctagggcactggtgatatgagggaaacgtgaaagacaagggtctcccttcatgaagcccatattcttgtggggaaaggagacagtaagcaaagcatcattaataatatagcaagtaatgcttggtaatggctataaagacacacatagtggagtaaaagaacagagagtgagtggttggaggcaaaggcattttaaatcaatcagttaaaggaggctcttctaaggaagtgacatttgagaatagcagtgaatgagggccattcaaaaaattagtcatgtaagaatttaagcatacaaatatctctcacataatttccatagcatgaagtactagaaaataacaaaaataaggacaaaatgaaataaaatgctctattaaacaaatatattaacttctatttaatagatgtctgttaaatatcatctgtcaagccactgactgactagatagtaagctggggaggagaaaagataaaaatgtgtctctgtacttgggaaaactacagttttagtgagtcattgtggtttgcttaagagtaggtgaacaagcagtccaaagcagtgaagtgtgtggaggcagcagcaggtacttaagtttgaccgaacgctagccaagtgcattataaggtgattgttgatgaattgttccttaatctccatccttcttccatctgcaactgatactatgcggtcctttagtgctgatcatatttctgttctaaatacttggtgcacaataggtactcagtaacagttctttgattgggtgaatggatgagtgaatgaagacagaagacaggctttaaacttttttaaagtatggtttagaagaaaaaggagtgtagttttgcatgtctttgcaagggtaaaatttatttcatttttacataagagtaaggagaattgggaggccgaggtgagaggatcatgaggtcaggagatcgagaccatgctggctaacacagtgaaacgctgtctctactaaaaatacaaaaaattagccgggcatggtggcaggtgcctgtagtcccagccactcgggaggctgaggcaggagaatcgcttgaacctaggaggcagaggttgcagtgagctaagatcgcaccactgcactccagcctgggcgacagagtgagactctgtctcaaaaaaaaaaaaagaaaaagaaaaagaaaagggtaaggagaaatccatccagatttgagaagaaaataagggacagtggggagaaaaaagtcaaaatgccagtgacaactgatagaagaagactccagaaaattggatggggtgtggtgaccagcctaggtaggggtttactttgaaaaatatgaaatagcgtttttcttcaaagacaggagaaaaataagtcgagttggacatgaggaaagattttaaggtatagaggagaaaagtctagggtgatgatctcggtcacattttagtggaggtaaaagaaaggccatctgaaataaagagggactggaagtccttgaaaacaaatgagtttcagaattggaaatttttttgatttttaggtaagtagtagatgcatctactacatactaagtaacactcctcatatggtctttggcagtaccctgtaatcatagacattaatatttttctagcaaaacactaatatttatatctggtgaaataatgatgataaatagtttccagtcaatatagtttgtgccaaatgtacaaaaagataagaaaacacgcttggatattggaataatggataagggattgtggacctgtgcaatttgcatggcctgtttttgtttgcaggaatgactgagatgaatgaaattgtttaagatttgaaaagtagcaggatttttttgagcaggggagccaagcagctgctgtgatgtctgatatggcagagtggtttctcagtgaactgcatcagcacattcctgtgtgtttctgtgcactctcctacacatgcatatgtgtgctctaatgcccagcaacctgaatggaaatccagaccacatgaagcccgagtgggactgcaaatttattatggtggtggtactattgtcaggaatttgttccagaggcactgagaagcttaaatggtgagattagcatatgctttaagatccaagggttaagcaagatatggagttgctgatgtttttaggacagttttttgacgaaatcactgttacaactttttggcttctattttatatggatttttttctacataagttgacatagtattgaaacttttcttggtattttatatttttatcacaaaggccaagcagtgtgcctagatatatctagtagatgatggataactaaataaattattgtaactatgaattatagcttgttataaatgatctttcatgactaaataaatgaattattgtgtgtttgtgcatacacacaaacctttgtactgtattttccacacaggattgcaataagccctttttcaatattgttgtggaaattctgtatatgttaaattatgtctgtggagatttgtgttcgttgacttcatacagtctcagtagaatatggtagaagtgctaagcaatgattccttaatattaaaattttaaaaaatagtaatgcagaaaataaaaccatcctatgagtttcatgttttaagcttttaattttaccttgaaaatattccctactgaagattgtggagctctacccagaggcggccacggggagaccctggcatgggagtctggaggggtgaggaggagaccaagagacccctttggagacttcatctcttggtcagtatctccctcatcaaaactcccgacccacagcaggatgaggatagaactcaagggtcaatgtctcagaactgggaggagcaagtactcttctgtgactgagggaacctgtctgactatgtataaataaaatattctaattatagagacagatttttttaattgatttgttttgttttttaatttttttgtagagacagagtctcaccatgttgcccaggctggtctcaactcctagcctccagcgatcctcctgcctcagcctgtcaaagtgcagggattacattgtgcccagctggagacatatttttaatgtgtgtacttgtgtttatgacacacatgatttgtgattatggaagaattaaatatatttcatatagaagaactaatatatgtagcatgaaagcttgcttttgacattacaaattataaacataaacattttggttattagatttcagaaacgatctcctagtattagaaagtagacatagatattcgggttttagaattctttgatcaaatcctgataatagtgaaataatgtaattatatcactttcacctgtacaaaattctcctaaatagtctcagtacttgtaagaactttatatattagtcacatcagataatttaatttccatttttgtttctagggatttacatcctaagtctcatgtaaaattcttctcatagaattgtaccagagtaattttttatgttaaaatgtatcctcaagggcatagtatgttcttttactttttcaatattgtttaaggccagaaaccacaaagtcttttcctggtggcatttttttcaaagctatgatcaagtgtcacctacatagacagtcatttgtatagaaattttaaaatgcctttcttaacagctttaaattgtccacctggactgtggaatgctaaaagatattgttctcagtattttttgggagccaagaacaaattaaaaatcttattctggtggatgggattttctaatttagcatagtacatctcaaatataaaaggctaaaactcagttgaaatataaatgatgtttgggagcaagctacttagggaatgcatgaataatgcttgttgcattccttttattatagtttattcctagattatcttacccttttgaaaaaaaaattccgtttccagaattgtaaggtaaaaatgcttgtatagtcccattaatttgatacaaagttctgatagaagagttcaagaatgtttaggtttgcctttacatcatgtcagtacccaataaaacattctccgcatgatgcagaacgtactgcagtattttatgtgagagaaaacagtaccaagagagaaaacataaatgaaattctgccagactgctgtggaatttctgtgagtttcaggtcaatgtatgtggttccagaattaaattaactcatgtggaaagaaccagccttaagaactttagtatgagcatatgtgtcttttattattctactttattattctcttctcttttatgacctctaggttacaatatcccagtacatactacctttggctctctttgaatgtcagctgctgttgaacacagtggaccatctacctagtaccttgtgaagcagatgacttctccatgatagtgtcatacgtttgatgtgttcagttggggaaatacatgtctatataggttaggccccaattttctggggttcaacactgaggcatcttaaggtaaccaaaatcaggccaacaacaatttccagaccaggaatactgtggtgttataggctacagctttaagggtcatcacactttgcatgctcagaattttaaatttgcctcaggatcaagcatttgctaatagccaaaggattattaactttaaaggactttaaatgtttaagtgattgtgaaataatggttagtgcatttttaaaagttttgtctatttttcacaggctaaagaaatcataattaaatattgtttaaccttctgaggaaaacagggccttttccaaaaacagagaaatataaaattttattagtttcattgactcgtagagttacctgtctatttaatacttctatttcttacgttaaaataagatttcagaaaaattctgtgagaaaagtgatcaggtcttcttccttcttttcttaaattgaccttaaatggttaggttaaggtagcatatatttgggaagacattgtcctgctggaaagacatttaattcaagctcttgcaggtcaagccttaggataatagaaatctgtcatctaagcccctggttgactggcacatactgcctaagaaatgccgtttccatatattctgaatggagggaaaaaaggttacgaaacagatctccagaacatgcagtgatcccttgatgtctgttaaagtacgtttaaattctttgccctgggaggaaattgttagactaatatgtatgttgagatatttgataggtttttaagagctggacttgcagtcatttgaagaaatgtgaggcatgctcatgtggtagaagtttagacaggggctcaaagtcttgggcactcattggggctgtgtccaccgattactgactggctgatttggatgggggttctctgtctccctggttctcccttttctccttcatattctctaaagagttgcacctgcttcattgattctcaattactgatttgaagagtgattccattagaagagtctaggaaacttacatagattcttgtcctatcctctgtgttggggtcctggaatctgtatggcgtcctgtgctgttttatttatttactgttatgtagtttttgtcttctctctaattgctgtcactgacacaagtgaaagctcttaagctgaaaagtaatagcagtccttcaagctctgaactgctggtctaaaaattctagcccagaggatgttgaaaccagacctaatagtgatattgatgatgaagaaggtgagtaaaggagttttgtttggaagtccctttaatcagtgcctttgtagaattaagcaaatcatttctctaaatttttaaatttaatattgatgttgtggccattattaccttgttatagcttaaccagtttaatgtattcatagttctcaagatttcctttaagactaaaaattaaattatagcatattttgtatgttctgataactggacttaaacaattacttgttttatagtattgagacagccacttaagacctttgattttcctcttctccccatatttctagaatactgacactgcttgttttacaacaaactttatgaagaaaaatgaaatgactgagagctttaaacaagactctagattgatttttattgcctttttaatagttcattgtgtatatgtaaattacatattaaatgtatgaacagataataaagtttttctaatgaaggtgatattaatatctaacagctactaataggtaggtaataggtatatgtgatctctgtgttatgtcttacaactgcatattgtctcaattatccaaaaataaaaaattaagttatatatcttttttcttttttctttttttttcagacagagtcttgctctgtcacccagactggagcacagtggcacgatcttggctcactgcaacctctgcctcccaggttcaagtgtttctcctgcctcagcctcctgagtagctgggaccacaggcatgcaccaccatgcccagctaatatttttctattttcagtagagatggggtttcgccatgttgaccaggctggtctcgaactcctgacttcaattgatctacccacctcggcctcccaaagtgctgggattacagacgtgagccattgtaccccgccaactattcttacctccattttacaagtgggaaaacaaatgtgcagaaaggtgaagtaacttccatgtttctgtagttggaaatggaagaattgggatttaatccaaggcagtctgactttggaatccaggcatgtagcactagtgttttgaaaatgtagaccaaatctctaaacttttgtttggtaggaaaatcaatactccttgatccctgatatatgatgaatttacactgtataacaaatagtctttatcatttcacagagggcatttatatcataccatttatgaagggagtttatatcatatattcccaagttatgttatgaaagaaaatgattaacaaaaatctttaatggtttgtgtactctgcgaagaaagtttgaacattatggtttaaaaattgtgttaggactttactgcttcatcagagcttaccatttccaggaacaggttagacattctgacattgttaaaattaaataggctggccgcagtggctcacacctgtaatcccagcactttaggagactgagacaggtggatcacaagattaggagtttgagaccagcctggccagtatggtgaaaccccatctctactaaaaatacaaaaattatccgggtgtggtggcaggccaggcctataatcccagctactcgggtagctgaggcaggagaatagcttgaacccgggaggcagaggttgcaatgagcggagatcacgccactgcactttagcctgggtgacagagcaagaccccatctcaaaaaaaaaaaaacaaaaaaaaaagtgaacaacaaaaaattgtttttcctttttattagcaatataatccatgtaaaagagtaactaatatgattgatagataaagcaatcaaagaaaaatcatgtatcatgtacttactacccagcttaaaaaatagagtaataccttttaaatttctatgtgctgccctccagtcatagtaatcttcctcccaccccaataagtttatcattacaccaattggtattatagaatattccatatgtatatatccctaaataatgaattgtcgagttttatatggtttaggcccctgtgtgttgtgttattgtatgcattcttctgtgatttgcttttttcagtcaatttatttttggattcatccacattcatgcacgtaagtttggcttattaatttcactgctgtagagtgtttctaatgtgactgtatttgaacttattaatcctgatttttgcttcttcctgttgaaggacattgggctgtatatgattttttctgttgctttattcttcaacacgcatgttttgccccttgcaacacatgggcaagaatgtatatctaggctagaagcataggaggctatttactggaataaatactttttgagataagtatttttataatttacaagatgatgccaacttgttttccaaatccagtgtgccagtgtgaatgttcttaatgccgcaaaaccgtatactgaaaaaatggtaaattttatggtatgtccatttcatcccaataaaaaaataggtttattgggataaaatagacgtaccataaaatttaccattttttaagtatgcagttttgtggcattaagaacattcacattgttatgtaaccgtcgccaccatttatctccagaacttttttcattttctccaactcaagctctgtgcccattaaacactagtttcctgtttcccctcttcccatcagaccctggaaaccaccattctcctttttgtgtctttgaatttggctattctaagtacctcatataagtggaattatatgatgttcacctttgtggatctggcttattttacttagtatgtcaaggtttatccatgttgtagcatgtgccaggattctccacccccctttatataaggctgaataatagtcctctctctatatatacacattttgtctacccattcatttatcaatgttgttcaagggttgccttgtgttttttttctgcccagccctggaatcagtcagttccccaagaagttcttgttcctttgattggagaatggtatttggaaaggtctagatggtagttgtgctctgaactgctggtttattattgttgataggctctgtcagtgtacagaggtaggaaatatatgtatgtttattaacacatatatgtatgcacatttatatttatttttaaacccacccttctgtatatctgttaaaatccataggtcatacctgtatctgtgattcttgtcctgtactacagggttaatcttagctttccttctctccttatttatagctctgtatttctgagaatggaaatgaggctgtcattatccacaatagatattttcccatttgtatatgtatataatacagtttcagatttgctaacctgtaaccctgcaaaataacatttactaactacagcatttgtgtacattagtactctttttcacacataacccttttccttattagaccaaaaaatccaaactctcttaaatatcatgaatttcatgttcttgtttccttgtttattttttctgtgtttttttaaatcacagatttaagatctgcccattcagagatttagttattatatatgagccaatgaatactttactttgcctacattagtttcagtttctgtcacttgtaaccagactgtcctgacacaaaagcacagtgtgactggtcagtcgtttcttcctttccacaaagaaagaaggaggaacatcttctgccttaaggaaattatttccaaagaggaaaaccagatacagcgagaatatgcacataagtactccagattatttgagaacaccttattctaatgtctacttatctctatgatatcaaatcatatgaaattaaagctctgataacttcattcctcactataatttacaaacacacccagaatgaacccatggcaagtcatcagtatctactacctaatcactttgcttgtggattcactattcactttccaatttgacaatatgttatagtgaggtgctataattttcattttaagctatacaacagaaatgatattacatttaatggctgaatggctttcatgttacaattagaggtatcctaagcaataagagttgacaaattatcctttaaaaacaaattgcaggacactcacaaagatagcttttgaaaggcttaccaataaggcatccttgaagtgaatatagagtatactttactaatctctatgaaactgtttgtattgaggttgtagttgcttttgaaaggggagtgttctttagaaatccttgtgttcagaagtcaaaggtgaagaagtatttctaagaaaataaaatgattaaaatagtagttattacccaatcacttttaaaatttaatatgggatccctgtgcctaatgaagactgtatttaatctcagtaaagtttacttccctgtgattctgacaaattttaagagcaaaattctttttaaaatgtattcttgaaaaccattcatttttgtagtgggtggattctttttcctgtagatttcaccagacaagaatttgtattttcattagaaaagtctgctcttcaggctatttcagtttattcaacttttttctaaagcagatgctgtttttctttttttttttttttctgctgctgttgactatgcaactgagtgtttctggcacttgatcagttaaaacgtaaatcgtaagccaaactactttcttttgtgaccaaacttatgtgtaaaacatatgagaaggctttagtcatattcctctgtttgaaatttgcaaggagtcttagagaagatcttctatagaagagaaaagtttgggggctgcttggctctttgcagcctaattgaggcatctgcttactgctgacctttcacatatgcttctttctccctttactgccagttatactcccgtacatcttctgtgaatctgccctggtcaacgtcccatcctttgagctgccattctacattgctttttcttaaattcaatgtgtcatctagttttttaattatctctctgctccgtgaaaccagcactcctcagtttgaactgtcactcgcctggcacacagattcataggcctcaaccctgatgtactcaaataagaccatgggtttacattattgacaaatgctgcagaaaactcttacgcatgctgttatttgaacagtactcagccaatgagtactttaaatgtaggaactaattattaattgcatttgtatctcagcagagcatttattagaagttcaataaatgcttattgaataaatatcaagatattgagctctttactatccctaagagatagtaatagtctccagtctggttgctattggtccacttacatctggtatggagttaacagtgtagtgccttgctactcagagtgtgggccacagatcagcaacatgagcatcacccagaaatgaagagtcttgggccccactctggacctaccaaatcagaatctgcattgtaacaataaccctagcgatttgtatatacatgaaaatttgaaaaacactggcttagggggccagagttatactgccatcttggaatgtagtgagggagattttaatccgttagacaaggagtgactcttcaatgagaacatggatctttgagcactaaaggatgtacttggggaagacagtggaaatggactgtatgtaaaattattgagttgatgcaaaagcagttgctgtttttgctattaaaagtaatggcaaaaacagcaactgctttttttttttttttttgagacggagtcttgctctgtcgcccaggctggagtacagtggcgcgatctcggctcactgcaagttccgcctcctgggttcacgccattctcctgcctcatcctcctgagtagctgggaccacaggcgcccgccaccacgcctggctaattttttgtatttttagtagagatggggtttcaccatgttagccaggatggtttcaatctcctgacctcgtgatctgcctgcgtcggcctcccaaattggtgggattacaggcgtgagccaccgcacccggcccagcaactgcttttgcactaacctaataacgtgctgtggaagaagcgtgtatgggtaaggttttctgatgtctttaggttgatgtagtttggagtggggtacttgggagaaatttcatccattcatatttcccttcaggatttgctgcaatggactgtgcacctcattcccttaattatcgcagaatgaaccagttagtcgtgatgataggctaaataaagtgatctaagatttagaagcatgaagcataagtacctttgtgtaaaacccaaatattatttaactctttaggaaatagatttagagaaacctgagacttgggtactcagatctaagaattttggcttaatattaaaatatttttaactcttttaagtccaagaatatgcttttatgaataattaattaaaaattgttaatgaccctcataggctttttctcctaattgaatccacttgcaaatgctaggtaagaaaatgccatttgagtctttccattttcccacctttttaaaactctcatcctgtttttccccatgttatccctgtcacgtgaacaagtgacagtttttttccttttgatggtatttcagctagtttaggtgtctggtggagttggtggtggcctggagagaagattggaattgtttaggggctagagaatgagcagttggacagaaatccaaaggaatgatgaacattatagaatgagcagtgagaactgcagtgagagccacggtcatctctatgtcaaataaaggcaggtggctgggtagtcacagagccaaattgggaactagacaaagaacctgagggtgatggaagtatctggagagatggccaggatgtgacgtggaagaggtggcatctgtgccttggatgactggcacagcagtagcacagatgtggctgcttgtcagtcactgacaaccagggaagggatagcttcagctcaataggttcgttctcagtttgtatgctccatggccatagtgattgacatttgtgatgacagttctgctgaatcacctcagaccaaatttacatatattacatgtcttttaaggttatgtgaatgttccaattatggctcttttggtttcaaggaacagagtctcacacactagttttattttagagaacccgaggggagaaaggcacgtatcatgagaaatgaaagcaggaagggaaaaattgtcaggacctgaagaaattaatgtctcagcatttgtgttatctttttttttctatttctttggtcgtgggggatgggaggagtgtctatatgctttctctctctcattttgtgtctcttccctcctccccatgatgcattttttcttactgcattagtctgttctcacatggctataaataatacttgagactgggtaatttataaagaaaggaggtttaattcactcacagttctgcatggctggggaggcctcatgaatcttacaatcatggcggaaggggaagcaggtaccttcttcacaaggtggcaggagagaggagacagcaggggaaaccaccgcttacaaaaccatcagattttgtgagaactcattatcgtgagaacagcataggggaaaccacccccatgatccagtcacctcctgtcagggcccttccttgacatgtggggattacaatttgagatgaggtttgggtggggacacagagccaaaccatgtcactgactttgcatgtgacctccatcctcaacattgttatgacttattagattcaacatcaaccattgcctagcagtagtctcttgggtcttgggtcagattcgcagggagcaagagtaccagctttctttagtttatctctgtaagccaagccaaacaagcccttggctgcctttgagatatgtgtatccctgagcaatcagttgtgttgagtttgaggccagtcacatgacatgtaaccctggttccttcagaaactgaaaatgagtcaggtaataacacatatatgtatcgttgcattttaatcatgattactcctgacatatttaatcaaatttgtacagttctgcctcgtttcaggacacattggtgggatttacaaccaggaataaaatacacattgggagaagttatgatccagtggagagataacagttaattaaccaaaacagataattttctaatagttttgaaaagagtatgttcatagttgtttttcatactattgaacttcattcttaatatatggcttcattttgttaaagacggggcttctaacaaaacttttcgaaagcacatcttgtggattactttaatggaaagtattttgttataatagtcttaatggaataattatttcacagccagcaaggctaacggagactatttgtagattgaggtatgttttcaaagcctagtggattagcaaacagttgaggaattagggccaaatgccttcaaatgcttgtctcttcatttttaaaattaaagttgatatttgaatagacagaaaatttaagtaatgaaaatctttgatcatcttaatagcagatatctttaaactataaattaactgctaatttaattcactgtaatgctatgtgaagtgagtgtctttatttaaaaacttgtaattttgctgaaaatatgctgattcttaaccacatgtaaccttctggttatttcattttgccttttcacatagttcttgcatgttaccaaactttggttttccttgaaatattttaatgtattatgttacattacactataacaataactgaaaagaaacaagaagtattattactgatttaattgtctttttttataaccttgaatttcatcatgatatgtaaattaatttttaatgtgccactgaattaggtaaataatacctttcacagaagataagttaaattataggaaataaataatcatttgaaactttgaatacttaaaaacaacaggtaaatcgaactatttaaatactattctatagttgtgagtaaatctcaggaagaatgtatccattcatatcctctctccctgaattttgtgttgagtaagagttttgcttaagcttttgcctcttgaaattactcctttttttgaggtttctttgtatgtgtctgtaaagaggcacatgacattgctgtctttatggcatttttttgtgaaggtctaatgagaatatagtcaactctgttatttagcagtagattagttggtgtttggattaattatactaaaataataatagacattttactcttacagttttaaatactgcgagccagcagaaatgatccatatactgaataacatctcgtttggagttgcttggtaacggatagaagctacattaggtctgttgccacgtgagaatccttggtgcttttgccagtccatgatgtagcttttgtagtcatggccatgaactgcgtttttgtgtgtggtctgtacaaatttaaacagtaacatggtttgggtcttttaaaatgtaaatgtgataaaatagacccaacttaaaatattggaatctaagtgaaaactgcatattgcttaacattcaaagaagttatcagtcaactgggaaaagtataccattaaacaatttccattgtaatatgaaaaagaaatcagatggctgatggttgaaaaagaaaggataaattgatgtcttttgtatctcattgagatcttgaagcagaagacaaaagcaaaagggaaaagttaaacttgaaaaaaacattgtctacttttgatcagacaatgcaggtttggtactgtcagcaggtgattggtgtaagaaccttagttgccatccggtacctgttatatcaggttatgtgtccagctgctttaacagaggccaaataatagtggcttcaacaagatggaatgtttatttctttctcatgcggaagtttcagctgaaggtagtttgggggtggaaaccaagcatcttgcgctcagatgttcttttcatcactctaccatgctttagcagtaaccctgtctatatactagattaatataagaagtgtcaaatgagattcatataaggaacataaaaaaaagactcttgggtgccaccccagattaaattataatctgagaatgagtactactccagacctactgaatcagaatctgtggtcataacttagtcatgagatctcacctcgctgcaaagcagggtggggaaaggtagtctgtaagctgcaggcaagtatacagctaaaacttggttggttttattaccaaaaagaagttagaataaatattgagggagacaataagtagttttctacctgtgaattagagtttaagacactcagcagtaataattatttacggcacttggtagtgaagagaggacagtggtggaatatgaagctggttaacatacataaaatgggaactacctacaggaggcacatactcccccctgtaagagtctaggaggtgactcaggctagtgaaaaagggccagtcgtttcagaggctggaggggctcttttaaagtggcatctctagtagttgttgccatgtaggaaagtggactaaagttttatagattcagttagaaatctacatttttatgaaaatgtgagcccaatttaacatatctttaaattagatatagattaagagccatttatttctcatttttgacctgaatgttatggcacaatatttcgatggcaaagacagcatttttcgtggtgtcaaactatttttcatgcaaattcattatatttaaaaatatttttgaaaagaaacttgataaaaatggcaaaggtattttagtagtcagtatccttttggccatttctagtaaattatgtgattcctttgtattcctaagttattatatttgaattgattttacatttttgggtgatacttgtagaactctaattttgaatgaacttttaattcaataagtatgcatttcttgaccacttttaacagtgattttgtgttctttgtgaccctctatctccagtttattaagaactacctctgcatgcagaggcactttgtaaactgtaagaaactctaatgatattttagtgccttgccactgtgtctggcacaaaaacacccaatgaataagtggtgaaaaaatgatacctctgttagataatcattaatgtttacatcctatgacaaggtgtctatagatttcaattatactaaaatcagtaggataccacaaatcaaaaatattttcttcatcattcttttctccattttacaaacaaaagagattgaaataaactttgtatctattgacaaataattggatcctgtagattgagttaattacttgttagaaaattacctcttctgcttcattggtcaagatgttctatgaagtagaatttgttttgactttctaatggcataacaataaatgtctaacaatgtctttcttgtatcttgggactagtttatctcatcatatctggctgacaaatgctttggcagtgacagtgtcttggatgacagtgctgttggattagattggctaacttctacagtttaaattaaaaccaggaccctgaaatgcttctcggaataatcatgttggttaccatgcccattgctcaatttttttccttttgttgaaggcagctctattagcatcttgtctatacatttcttgactagcgagaagagatacgaggctttagggctgacgtaaactctcatcggttggacaggtatcatgctctttttcatttatcaattccaggaaatactgggtttggtccttgttaataaggaaggagaaataccaagactttcgtgagtacttaaaattcacaagttatgaagtttacaatgcgttagttctgtggagctctggtgggggcatcttctgaatatgggcaggacactgtcctgcagctccctggttatttgaaaagggatgaaggctatgctgtctggctctcacttccaccttctgactcccactctttccctctgctgaaaatggtgagtcaaggccagctggcaaaaattagcatagaatggggtattgtttcatcaaaatttggcaattggggagtaatttttataaatattgacacttttgttatctctgggaggtgattggttgatattctatgtatagccatttggccacttcttaatatagaagaaaatatttcctgagtcacctttcttaattttctcaaaataattaccttgaattgttatagatccatcttttcatgccaacacaaacttttagatgctgttgagtatgtttttaacaaagtataagtagattggttttaagttgacttagccattgttaatgattcagttgattttttaaaattaagaatgcattaaaaatgaaattgatacatttatggagaattcataaacgattcaaatcaattactttatagacataatacatatattttgtatgtttttgtaatttttgggaaaaaattagcttaattatgtttctgagtaagctaaagacattcaactgtattctttcaaatttgccaaagaacaaaaagtaagattttgtcatttggtttattggatttttcattattcactatgataacagtccaaaaacaagaatcaatttcttaatgctttattatatgttttgaagggagttcctttgttctgtgtttaccttacagaacctcagagtttaaagccacattctgtttttaagggaaagcaagtcttgtcagtttttataattgcaaataggataggaaatcatgaatggatgaaaagtgtagtgtgataagtcattcactagaaggggagttgaggcagtgaggggcaggatgatggagtgataaagttcatagtaattataggagaaagtgagtataatggcaataaattgaaaattgaccaagtaagatatttgaggaaagccagcatattgtgatcaacatgctggtgtaacctaattacttatataacctgaaagtaaattccaaatttcttctggcaagaaatagtgattttttttcctatgcaagtaataaatttgctgatttgagttcttatacaccttctgggcataacacaagaacatgaaaaatgttattcttcaaattactgaccttatggctaatgcctttccttaatgctagtctcattatattctattcttggtcagaaattccatatgcacagctttcattggaatccttagcattacttttgatattccaaagcacttttcttaatattctcttgccattcaccttaaaaaagcagtagatatagttggttttgttaagaaaagtttcattggcaatcatttatatttctcaagtattgttgctaatcaaaatcctaatatttagcctctctttagcattttagtttgcctttttcttagaagatactagcaaataatatagtgtttcaaagtcacaatgtcttcaaatcttacggttgattcagactgaaatcttttatggattttatgccccacctggagcagtactcagtaatgtattcacagcaaggatgtactctaaaattaattatttgtgtcattcatctaggtattccctcactaataaattattgctttcttattcagtataaatttgcttttcactgttttgggtgacctcggtcatcagtgggtagttaaaaattctcttccaggaattccctctgattatctacaacattttgggctgaataataggtgtgctgcataacttggagaggtgaccctttgatattcagtttattaattatttatggagtgactatggaagtggagtagtaggagataccaaatagtagaaaatactgtccttgctttcaaggagttcatgatcgtattatagagacaaggtatacttgaaagtctaattatgttgctgaaaaagtaatagaggccatatatgtcatcgaatagtggggggcgggggtgggtagggggaagacaggatggctgtgggttagcatgagaggagaagaagtgatagagaactagaactgatccagtctatttgcagttgttagaatttgactgggccgctaggcagggcaagaagtggaaaatagggaagcggcttaatgtcatgaataaaaacagagtaagagactcactggtgtgatagaaatttctactttgaattatagtggagaacaagtttaaaaatagtagaggagattgaatttgaggaaagacaaatctagattttttttccaggagattttcctcttttgtttgaattatggttatttgaataatccatttcaaaataccacttaatcagacagtagagggaactatttatatgacgtaaaaggtagtttggcagacatgattaaggagaatgttagagaataagatatcaacatggaaagagatgtgatcttttttaatctggaaaaagcaagacaaattgctttgaacatgtaggtgaaaacgtaccttaatgtttccaatttaaccagaaaatatgattaatgtaaaaactatagcaaacacagtaattttactttgtaattctgctataatttgtttcatttgccatattttatttttcttgttgtcatttgaatttatacctgggaatgccataaaacttaataccttagaactataatcaagtcagaagagcttcttttccataatggtgtcatatggtttgacatccactcgtcatcttcaggatgttaaagtctaagatatctactttacatattttatgtattcaaacaataaggttttatgcatgagtgagtttgaggctttggaatatgtgcacccactatttagtaaactgttgccttccattgttagggtatccttgtgagacttaaaaaacaaacaaacaaaaaacaaccagaaaaccaaagcaatgcccctgaggccaactctgtaaacttatgggaggtaacagtaaatgtttcaaggacaattctgatatgattcctaccaatgtcacatagctgctgacatctgggaagtgacagtagctgacagaccatgttggcacagcagaaatcagagatggactagctcagttggaagaaaaatgtcatgctgattgggaagctaagaagcagaacgccacagtggcaacctgtgcaaacagtggctattaacattaactaacagacagattgagtccagctagggctgcggaccacccatcagtggatctgccatgcctgtacatataggaagttctttgctgtcagcatagcttcgctcagtaaaagagaagtgatgtttatgttcattattatgcttatgttgggtggtgacagataaaggaatgtaccttttcttatgaagagtaatgcaattttaatgagaatttgaccttgaaggtaaagaattgctgaagcatcactaattgagtattcatttaaaatgtattcccagtttagctgctggttcatcctcactcatccctgatctcaacattttcaagatggcaccctagaagttggagtatgttttagggcaatggagtcaaggcctttggactgaaaaataaaagcatggaaatagcatttgcttttactgttttatcatctaccctttggctgcctccctcaatgttggcgtcaagggtgattctgaaacctcaaagccccagtgaagccccaaccgcatctctaaccttttacctcttagtccatgatcttcctagctgccttacagaacaaaaacaatgaccttgagatgggattcaactttctcagttccttaccttattgtatacaaaatgtattaatttctgcactggagacttgggattgcttctcctacccaaggctaattttcatacttgccttttcaattgcatttcctcccttcttgctggaaacttttctttttaacttcacatgtcccttctttctcctgtcttcagcctctctgctgcgtggactcatctgagcctgtaaacatgaaggctctgttttcttaaaaccaagttgggaaaacaaacaagctgcctttatttcctccttgcattcatttttctacaattctttaatcgttttcctttctcagacaagttgcttaaatgagttgtttaaaggagaacatgatccttcccttccccgccctgcacgttctgctgttcacatttctgacctttgattcattgaaactctttgaacagtttgagaagtttatcaaggaataacttaagaaaaatactgcatgcaatgagaaggtcattaggacagaatgagaagcttggtgtcagagctgatgggccctgacttagcctgctaggtaacacagctcttgtttgtttgtttgttttatttgtttattccttgtatatttgtgtacacatgtttcattctctttgaatagccacagatgaggattcattaagagcctagactttttaatagacttacactcctttagaaatactttaaattcaataaactaaaaatatccagaatcctgcagtcagctatataggagactacatgtcgatgtctagtttctaagcatggataggtccagtattttcagtcatggtttttctataattttaccatagcaaatatgtgaattgtctgtggaatgtttgttctgtcaactgaagaatgacaaggctcatagatttggaaggaagacttttatttctcataaagagttgtggcctgcaggtggccatcctggcaggctggaaagggtagcttcctgccagaagccagaaacaggcactccgagggagaggtaaaagaaacaggaatttatgctgggcagggtggctgaatacacgtatttaataagctgtagcaggggtcatgaatacttgtgaaaggagaaacagacccaagtgcaattgagcttcatgcttccagatgggtcatgtgttcaaaaaatggcattggcatgatcagtgggtggagattttggccctctgatgtcgaaaagtgaagcagaggccaaatccctctgtgtgcagcctctgtagactggccagaccactcagtggtcagtggtctcttaccaggaaggaatgctggtgggttgttgtgtcaaaattgcaaaagggagaggcagcagtcagggggctgggtgaaatcagcggtgcagcaagtcttctgaaagggctggtttctgtttagcccttagggaagaaagcctaaaggcacttagcgcgggaggatgcatattaaattgtcctacctcactttcactcacagccgggaactcagtttttaaaatttgcctgggttctccatcgtgaagaggcagtttgttcaatgagttcggaagacgggcagttaggatttcatttttatttctcaatccatttatttacagtttatactcagcctggttctagaaagttgttgggtaagtgactgccccacaactttactaccatagtgaacaatggtcaaggagaaggaaattcagaagatcttaaggaagacaagggcttcaggatggtgtggatcatgctcaatgacatgagatgcaggaagaagaaatcctacacaagttcatgtgtaatgggccagctgggctgtgtggagcttaagagagtaaaaggtgttgaggctgaggcagtaagtgtagacagtatgaaatgtaaaggagaaggtggagatttgttggaatgagattgatcctataatggattcattacatgatacctatttgtgtaatactctagcagttgcaaagcatgctcacttgatttttttccttttaacctcctgaagattctagttaggtgggacagtaaaattgttactgtcttccctatttttcaaatgggaaaatcattttaaaacagtgagttgcataaatcacatagagagtagctgagctaggatttaacagaagtttatcttaatccactcctgtgatctttctgctttttcagttgtcttttcttctaatttaaggctattagataacaaaagcagaaagaaaggaacttctgaagatgctcagagagacattgggaaggacagactccctcagaacccaggaggagccaggctctagaacatggtggatgagagaggacattactcttaaagagaaagaaagattttcattctccattatttcagaacaagctgacaggtagaatttagggtctggaatttggaatatgttaagtaaagaaagaatcttggtgagttctcatgagatgggggtccctgggtgaagcctgatgcaaagcctttgaatattctctgttgataatgcaaaagagcacatttgattgcaagttttaattggtctcacatagtcatgcaactgtgtgtttgtgactgctgttcgccaatcttcatggattattgaaataaagaaagcaagcacttggctcctttcattgccaaatcttttctacattgatactgatgtctctttcagaactggctcttgcagaataaagactttaagagattttaaaactctcaccgtattccttgggttcttgcctacccccttaaggagaagaggccaattgtgcttttgtaggtgttaactggctcattccccagcctctgtttccataaagctaaaggtcagtctgatcaaaccatcaatgacagtccatctcacagatgcttaaaatgtgtttttcagtataatcttgaaatgtgataccgagcagacatctcgtgtctcaaagtgttaatatatcaataacatattacaactttgtttcttaaattatcctcttcagataatattaaattctaagtccccagataatgaaaggtgcattgttccatcttgtggcagagaaccatttagaaaacattttgatctcattttttaaatcattagaatacgctgttgtattttttattgttttcatagcttaagaatgacccctattttttattgtacccctgttttggacaatttaacccttttgataacccatattttaaaaaaaaattttttgtttatctattttaactctgaaaaagtgaataaattgaaaaacaaaattagtatttatatggttccgactcccaggattattgattcctccttttttgtatctttatgtaaagcattattctttctactttctagttacagatacacacacacacaaacacacacacacacacacacacacacacacacacacagtgactattccttgggttttgcatagttaatttctttctttctttcttttttgagacggacagagttttgctcttgtcacccaggctggagtgcaatggcacaatcttggctcactgcaaccttcacctcccaggttcaagcgattttcctgcatcagcctcccgagtagctgggattacagtcacccaccaccatgctaattttgtatttttagtggagatggggctttgccatgttggccaggctggtctcaaactcctgacctcagatgatctgcccatcttggcctcccaaagtgctgggattacagatgtgagccaccttgcccagccttacatagttaatttctatagcataattatactgctctgtaagcagatttcctgtgtgactgcattttgtcatatatagcaaaattagtatgtagttttgtaaggttcaaattgatgttagaactaaaggtggaagagtacttagctttgtttcttaaacttataccatcctcctaaaagcaatcttgcagacagatgcaggggtaaaaaaaaaaagaaaaaaaaaaaaagtagtgggaaggcctttgtcttttgaaagaaaaaatcacatagtgatactctgaaaagctctcatcggagaataaaggatgcaatcgctgtattaaacacagatggaatatttcagtctcagctgtcattgaagaatctccacattagtttggattgcgcacctttggggcatgtataaattgacagtgataaaactacctcgttgctgagctggagtgtacaacatccctttatctgtgccatctggtgctacagaggatggcaaattcttctctgccatgatttttctttctgggggatttctagacttccttagcatagaatgtgttggaccaaaatcactctttgcccagatttcagtgacagtagcctgaaaagagaaacagaattctaagagattgtaagtgtagcaggaggcagagaaattatttgatgcactgtaagatattttggagggtagtggttgattacaatgtgatgctttataatccctgaccatatctcactccctagtgatggcaagctgttcctagttttgtttttgccatttttactattgcttgtagcataataatattaaacaattaatgctttggttcttacccactgaagcaatgaatggttgttattctgccttagggctcttatttattgtggattcccaaacaagtttacaatgctttatcatcacttactcaatttatctaatttaagaccaataacaagatttactggctgttgagtcttgcaacaacctgtgttcctttattatctaccactgcctgtgattaaaatgaaaacaaagttggattgcattttattaacaaaaggatatttccaagaattatgaattagtgatagaaggtttataaatgattaagttttaatttttccccccaaattgtacttagcttatgtaaaacagtctagacccgtttaggagtttatttgttgtcataaaatatcaaggtgagagttgacttttctctggatttgttcagtagagaactatgctgggaaggactatggagaccttattaatagaatcacacctgaattgactgaagccaggttacaatcatgaaaaatatgaatgaaaattttaaccaaataaaaattggggctgtttgggttaaaattgaataaaactaagttaaatatacaactgtttgtggcctagaggaaagttacattggttttttttagttcttaggtagtgtagtgtggttagaaccttttctgaccagacgaggttgtattcacctctactaatttcttagctctgagcacttccagtgaattacctgaactctctaacacccgttttagctcatcaaaattgttcatatttcccttttcattagggaagggaggtttaacaagtaagttctttcagtcttaatttgcagtgaggttgtttcctgtttgtctacgaatttagccataactcaccattcctctttccatgtagaaaataattgtggtttttttttttttgtataaaaaagtgaaagtgtgtccagcaaggaataacttggggaaaagccaggaaagcactatcttattagatataaagcattccagtgtcaccacaagcagttgtacaaagaagaaagattggattatgaaactggactgtaattcttagacgcagtaccactcctagaacacgcttgggaaaaagtcagcaagaagattggacctggagggagtgctagaaaggcaagttggtggcaggagggcaaacagcacactttttttctagctatggttttctctggacattctcagtgccttgatattccagtgctggatgggaaaccactgatagaacattaatttcttactttgctcattagtttaagattacagtgttaattattcacaagagaagaaagtaaggatatctttttttttttttttgagacggagtctcgctctgtcgcccaggctggagtgcagtggtgcaatctcagctcactgcaagctctgcctcccaggttcatgccattctcctgcctcagcctaaaagtaaggatttcttacttcttcttcacatctccccctttagagactgtaccagatttaagcctgagaactcattggttccttctggtctaattctagagacatgtgtaccttacttatggatacttggcaaggtaggcattagtatttggatgcttatcttcacaaacctgagtgaggttcattgtgagggtagaattttggagaaaaatgcctgatttgataaaaaagagtttttcagtaaaggaccacctaatttctgccttctggacagacttcacaattggggatacaagtggtattctaattgtgagcatcatcctggtttccattccacccctagcagagtgcctgccatgatggtgctttttttttacttgataaagggattcacacaagggagatacaaggtgagcctgatgaatcttgttccccaacctagaagatgctcagcctaatgaaatcacctcaaaaggaaacaggagccgactggatggcacttgcactggtaaaattttggaattttgagcatcaaaaaagaataacgactgtaatagattgcaatatattgaataaataaaagccattgagtaagtgatacacttagtgatatacaataataccacttagataacatcataaaacatgaaatacttagggataaatttgacaaaatatgtgaaagatctgtacattacaaactacccagcattgttgagagaagtgaaaaaagactgatgtaagtaaatgagagatacagtttttatgagtcagtttttatgtcattaaaaatgctaatcttcaaattgtttatatataaatttagtgtaatcccaacaaaccttgacaggcttttttttttttttttttggtagaaattgtctggaattgatagaatcaggtataagctgattctaactttatttggaaatgtaaagaacctagaatagtaaaaacatttctggaacaagaaaacctgaaatgaagagaacttacagtactgaatttccagacttcctataaagctacttaagtcaaaattgtggtattgacgttaggttagaagatagatcaataacttgaatagaatccccaaatagaccacagttatacagtcaattactttttggcaaagatgtctagataattaagtggagggaaaggacagtctgatcagcaagtggtattactaaacacacccatctccattcaatacaaaattcacttgaaatggatcatagaaccataaaatttctggagaaaaagaattggagaatttttttgttattgcaattgtagcttaggcaaatacttcttacatacagcatacctgaactgcagaagaaaatgataaattgtcaagccaaagactgggagaaaatatttgcaaagcgtatgcttaataaaggactagtgtctaacatacacagataactcttataatttaatattaagaaggtaccctgattaaaactggggtccaatatttaaatagacatatttccaaaaaagatagacacataaatatatgaaaaagtacacaatgtttctagtcatcagagaaaagcaaatcaaaattacagtgataacattatatacactgaaatcactaaaattaaaaggactgaaaatagcaagtattggctggcaaagggcaaagcagcttgaactctcatacattgctgggcaattcagaatttagaatagtctaatcattttgaaaaagtttgacattttcataagttaaacctgtgcttagccattgtgttcttaagtatctacttaaaagaaatgaaacttatggtcccacaaatagcagtaagtgaatgttcacagcaactttgttcataataacctcaaactgcaaccaacccaaatatccgtcacctggtaagcagatgagcaaattgtgctatatctatacagtggaattctactcaatacagtggaacaactacttttacatgcaaaaacatggatgagtctcaaaagtgtttcacaaagtgaaagaagccagacaccagagactgtatactataatatgattccattaaatgaaattcttaaagagcaaaactgtaatgatacaaattagatcagtggttcctaggggtgaagtgaggaaattaactgcaaagagcaggagggaaattttgggtagtggaagtgtttctgtatcttcatcgtggtgatggtcacacaactctatgcatctatcaaaactcaaactttaccactgaaatgggtgcattttactgtactcaaattagtcctcagtataattgtttaaaaataggaccatagtggtatttgaggggaaaagaggtaggggtgatgggtgttaaaataatgaaaaaaggaaaaaaggaaaaccttcagcagtctgcctgctaataaatgtaggagaaattatagaattggcaagatttcatttttaaaatcgttacagtagcaattgatccagtcaagtggttgtcagtgacaaccacttgagaaagttgttgaataacaagatagtcacaaatactgcgctacaaattactgactaccttaattggataaagtgcacctttctaatacccatcatttccatcaaaactcacattgctagcaatgaacaacctgacaccactctgaaaatacccatccttgtcatcaaaattcacattctagcagtggaccacctgatatcacgtgtttgttaatgtgcacccccatgaaatgttcttgttcatattgtttaatttgaatctaaaccaaactaaaaccctaattttcaatgtacaggaaatacaagggatagagaaatgagtttaacaatgtcataagtaaatgattggccaaatcctgaatgtagaacattctacaaggcaattgactggactcttcaaaaagttatgtcaaaaacaaacaataagaaaacaggaaagaaaggggaacttttccagatttagagttgaaaaagtcacagccaaacgtaatatatgcagcttgattggattcttgtaggtggaaaaagttgtaaaagacactttagagcaagtggaaaaattttaaaatatggatgggccgttagacatagtggaatttggttaattgttttggtgtgataatggcattttggttttgacgagactgtttttattcataggggaagcatggtgtgttgcatcatgttgttggcaccttgctttgatgcggaaataaaagaaaggaataattcacatccgcataaggcaacaataacagaatataaattattaaatctgggtgaagggtgtatgagcatttatttactcattaacttttctacgtgcttaaaatgttatgacaaaaagctgaaatataaatatacccttctctgggaaagatagctctgaagagtagtttacccccggaaactctttgagacttttgattcttaagtgatgtgaccatttaagaaggcacatccctcttactccctcttttctatcaagtcctcagttctactaaaaaattatgtttctatacaggaggagaaatctatgagtactattttttttttttggtcagaaactaaagattaactgatttttaaatttagattaattcagaaagaaaatgcattagttaaaacaaagatgtaaaacgtttttattttttaaattcatattttcatttccatagcatttggggtacagtgcttttttttgttacatagatgaatcctatagtgatgaattttgagattttagtgtacccatcaaactgtgtgtacattgcacctaatgcgtagtttttatcgctagccccccctttcatcctcctcctcctgagtctctaatgtctattatatcactctgcatgcctttgcgtactcatagcttaacttccactagtgaggacatacagtttttggttttaggttttctactcctgtgttactttttttagaatactgtcctctagctccatccaagttgctgcaaaacatattatcttgttctttttaatagctgagtagtattccatagtgtatatgtaccacattttctttatccacttggaagttgatggcatttagattggttctacatctttgcaaatgtgaattgtgctgctgtaaacatacgtgtgcaagtgtcttttcatagaatgacttcttttcctttgggtagatactcaatagtaggattgccggattaaatggtagatctacttttatctctttaaggattctccatactgtttttcatagaggttgtactaatttacattcccaccagcagtgtataaccattcccttttccccacatccacaccattatctattgttttttgactatttatttattgagatggagttttgcccttgttgcccaggctggagtgcaatggcccaatctcagctcactggacctctgcctcttgggtttaagtgattctcctgcttcagcctccctagtagctggaattacagctatggaattacagctggaattacagcacatgccaccatgcccagctaatttttgtatttttagtagtgatggggtttctccatgttggtcaggctggtctcgacctcaggtgatccgcctgcctgggcctcccaaagtgctgggattacaggcatgagccactgcgtcccactgactttttaatcgtggccattcttgcaggagtagggtgataactcattgtggttttaatttgcatttccctgatggttagtgatgttgagcattttttcatgcctttgaccattcgtatgtcttcttttgagaaatgtctatgtcttttgccccctttttaatgagattatttgttttgctgatttgtttgtgttccttgtaaattctggatactagtccttagtcagatgtgaactttgcaaatattttctcccattctgggtgttgtctgtttactctgcttattgtttcttttgctgtgtggaagctttttagcttaatttggttccatttatttgtttttgttgcatttgcttttgggatcttagtcatgaattctttgcctaggccagtgtctagaagagtttttccaacattgtctgctagaatttttatagtttcagatcttatatttaagtctttggtctatcttgagttgatttttgtatgaagtgagatataggtatccagtttattcttttatatgtggtttgccggttttcccatttaatacataggatgtccattccccaattcatgtttttgtatgctttgttgaaaatcagttggctgtacatatttggctttatttctgggttctctgttcttttccatagatctatgtgcctacttttataccagtaccatgctgttttggtaactgtagtcttgtagtataattcaaagtccagtcatgtgatacctccagatttgttcaaaaacttttgcttaggatagctttggctattcgggctcttttttgattccatattaattttaggatttttttttctaattctgtgaaaaatgatgttggtattttgatggaaattgcattgaatctgtagatttctttaggcagtatggtcattttcacaatattgatccttctaatccatgagcatgggatgcatttccatttgtgtcatctgtgatttcttttagcagtgttttgtagttctccttgtggagatcttttacctcccgcattacatatgttcttaggtattttattttttttcctgatgttgtaaaagggattgagatcttgatttgattctcagctaggtcactgttggtatataacagtgctacatttttgtgtatattgtaaatctaactttctaatgtggaactaatgagattggaatctgaggctagagtattagctttatatttttgcgtaataaattaccacatagcttcttaaaacaagtctagtttattaggtaggagttctgaaggccagaaatctggacagactgagctgagttctctaattagggtctcacaaggccaaaatcgtggtatcagccaggctgggctcttttatggaggctttgggatgctctgttgcagagtttgacctcctagacaggcaggtctgaggtccccacatcctttctggctgttcattatggtcactccctgctcctagagggtgccccaattctctcttgcatttccctttcatcggcaaatgagcaacatctgattttttttcttccctaacttccccttctgctaacatcaggagaaaactgtttttaaatggctgatgtaattagatgagacctactaaatagtctctctggtttaaggccaactgtatcatataacataaaataattccagggatgatgtctcatcatatgcacaggttctagctatactcagtgggaggattatgcaagggtgagtatcactgggaattcttaggattctgcctaagagtttctactttggtttttgggagacaattttttaaatctactttttaatctacttactggcatgtgtatgttagttctctgtgctttatcacctgcctatttattgaattgtatgtgttacttcactgtacctcagcatctgtcaacttatttaaatgtgtgtgttggttttctgtgccttgggatctactcattcattggaatgtgtgttttggttgattgtgccccagtatctatgtattgaaatgtgtgtgttggttcactcagcctttccatttatctatgtattgaaatgtgtgtgttggttcattgtgccatggcatctgtctatttattgaaatgagtatgttggttttctggacctgggtatctgtctatttattgaaatgtgtgtgggggtttcatcatctctattattatattattattattttgagagacagtattttgctctgttgcctaggctggagcgcagtggtacaatcatagctcactacagcctcaaactcctgggctcatgcaaacctccagcctcagcctcctgagtagctaggactacaggtgtgtgccaccacacctggctaatgtttttgttttattttattgtaatggatataaggtcttggaatgttacccaggctggtctcaaatccctggcctcaagtgatgctcccaaactgcagggattacaggtgtgagccaaccatgcctggcctcattatgtctattttatctgtgtattttctcaatgtaagataaacagttatttttatcggaaaaaaatttttggttttaatattatttaagagggcaggcatttcctttttaagaataaagcttctcagctttattttgtaatcataacacagtaatgacatttttaaaagaaatatacaatgccccttttttttttgtattagtttcaaagatattccctaaactttaattctgttttctttctttctttttcttttgttttttcttttttgtgatggagtctcagtcactctctcatcacccaggctggagtgcagtgatgccatctcggctcactgcaacctctacctcccaggttcgagtgattctactgcctcaacatcccaggtaactgggattacaggtgtgctatcatgcctggctaatctttttttttttttagtttttagtagagacagggtttttgccatgttggccaggctgatcgcgatctcctgacctccagtgatctgcctgccttggcctcccaaagggctggaattacaagtgtgagccactatgcccggccaactttaattctttacatcttcggcacatttattttctgattgctctgtatgaaatcaaatccagccataactttattgctagcatgcttcagttatctatttctgtaaacaagccagcttagccgcagtagtataaaacaaaaactgttttattatgcttctggattctgcagtttaggaatttaggcagggtatggcagggatgcctggtctctgcatcatgatgtctggggcctcagctagaatggccaaggcttcaatagccagggagactcaaaagattgaaatctaaaatcctctgaaggcttctttactcttatgtctgtatctgggctgagatgactaaaaggctgagctcagctggggctgtccaccagagtgcctacatgtagcctcctcatgtatcttgggcttcctcagagcatggtgacaccagggtgcacagatttcatacatgacagctctaggctcccagtgcaactgaaaagttaatctaaaaatcttatatcacatttgaaatagaacatgtcccaatattgtttctcatatttgatagtggatgtttttgtgtatcttaaagtgtgttcatgtgttttaagttatggttttatctctagagaaaaagcaatgatgacttctaaatcataaaattgagactcttagatggatggaaaaataatatattacctatatattattcatagataagtagcatttttatttcatttcaaaataattggcatcaatttgaataacgcatagtttaagaagcttgtagcataattaaaaatggcaggttttgctttgttcctgtatcactaatgaactgttagaattttgtagagagctaacaacttttggaaataggaaggcagaaaacattactgatatagtgatataaaagaaaggagaaaaagatacaattagtatttataaaatgaaattatatttgccttgttcctggctttctcaaaggaaagaaataactttttcttgtgttacttaaaatgagatctgatgctgctgagttctttgtttttttctatgataggcctgaggaaattaggacttcatttccccaaatcttcatgggtcttgaaccaacagaaatgtgttatagtagccacctgcgacactaactctcctcacagaacccatcatgatatggtcttagttcataattcagtatttccttagatttatagtgttgtgtttaatcttagagccctccatgttattttccaagtagtctttagtttattaagactatgtttattcttactagtttgagaagaaaatcttgaaaagtcctggcttcaccttccttttctaccacctttatagaaaatacacctcttatacctgtaatttagcaaattatacccgtaatttggcactttgtagacataaggtaaagtcattttagggggctgtcccagtggggacacaagccatctggcccagggatattatgtgcttctcaactgtgacagttcttcctactcattatataatgggcttttctaaaagcaattttttttttcttaaaggattcagcaaacccctgagctgtaacaataggattaagtgatgctgacattcaaagtccggaggttctcagtgtggtccctgggccaatagtatcagtattacctgggaacttactatgaatgcatgttcttacacttcacccaggatctacttactcagaagctctggggctgggatccagcagtcttttaataagctatgcaggggatactgatgcaggctaagttttagaaccactgtctaaggatttgcaattgttcttagtatttaacatgcattgtaccttcttatccttctgaataagtatttcttattatttatgtaaggtagctttatatgtataaaatagtcatacattttaacattatacgtatatgtatatgtacatagtcacatatatttttcttgatttttacattaatttaaaaatggggaatgcactgtctctgccattgtcctctccagattttgagatagaaatgaagaaaaccatgtaaaaatgaagataagtagaccagggtgggactctgtggagctggagatcgatgggcaagagatgtgaagaaggtgaggagaaagggatagagtaagggggcaggaccttggcctgtaacttgtgctgggagctcagctgagagcatcactggggcagctgagtgagaatagagcaaaagctgttgctctgtctatatggttttaaccagggttgttttattccagggataatgggaaggttggatcaacacccttttctcagttgattcttctcattgatacctttgcctttagcactgtgtaaactcattcctgcagtaaaatgactttttaaatgattgctcacttgtcactaacttgatctgcattgtcacagacttaattataaaacttttaattctacttagtactgtaacataggatagtgttttaataggtagaataggattgttttgctatgttagattaaatatggagggggtgttcatatacaaagaaccatcagttgctttttccaggaacattatatcattgttttaacaagtaaaagagatttcatttacattgtttccatttacaaagctttttctcagagtttgtcttttggaagtccacactctttgttttgtaataggttgggaagcaacatggctctaagcaagttaaccctgttttaaatttattcctttattaattttttggaatagtaatttagttatgattcacaatttcaatgttatctttaatgtgttaacttctagttttagtgtatgtacccagagtagatacttactaaatgttggttaaatgaatgaagattggctttgttaagatttttggagagagctccttctgtgttgtaaaggtgctcagaagggtgattttttttctgctgctctggtttgatttttgcattatatttttgtagttaaatattaatctctcttttgaaatccttaattgcatatagatttttaaagttgatctttattttatggttctttgctttaaatgttccacttaattttaaatgggaaggatttaaaacaagctctaaactagtatagaggacatgtacatatcttgaaaaatgacctgttataagcctgtacactgtggcatttactggtaaggtttctcatcatgtgcatgtgaagagaaaagaaacaaacttattttattgctttaatggcgttgtaaaaaatggcaagaacttcagcaggggtttatatcagccagctcatttgggtttctaacttccttcttattgcttttccttcccatagcttcctgagtggcctttcaagtttttttttccacttacatatactcatatttttcttttccatgtaactctgacacatagttactctcacaggtctgtcactactcagatatcctctctatggtgatctcagaccgtagccaagtttcatccccctaatgctactcagccagtggatgctgacatttcagaagggaagtgtggatgggccacaaagtaaggacttctcatttctttcactgagaagtattttggctctttggttggttctaataacaactaggactaccttggagtaggaaaacctgatttcagagtctaacaaaacccaaaggtaggcattcagaaacctggacctcacaaagggaaatgaaaagtgatcaagaagctagatctggccccttttttctatctgtattagatatctgctctgttcttttctcaactctcaattgatttggtaaagatggttaaatgagaacaactgaattgtaaaattatctacatttcatgattaagcctgactgaattaagatctttgtaccagagagtcattcagattggtccaacttggaccatatattctcctgtatccgacagactgtggacaaaagatggggttcacagtaaaacagaatgtggaccctcaggaaccttgtcccatggcaaggtcagatctattctgattcaaacgaggccaaagcaaacaaaacccaaaatttggggttttaattgatataaaaacattttgaattttgtagcacatttttctaattcttaggtgccaatttggagctgacagttcttatttttcaagatggaacagacaaatgtttttaatctgtgtggaatgagaaactggggaggatgcagctgaatgtatgttttaaaagagagagagggtttaatggctgaaacaagatctaagaggagtcagaaagagatccagggccagtcagatgaaactggtggccttgggcagaagaaaaattgttctctaagacaagggatatcaatgtgcctgtgtatcaggatttggagagttgaacttaattcctgagtgggagtcaaggctgtcagctaagattgatagggttgagtagggaccaggcggaaaacagtgaagtttgtggaatagaaccatgaggaaattaaagaatttctgacggtgagactaaagtttaaaatttaaaatctagaccaagaggtaccactctaacccattcccctccagtaaaagcaagtgattgattaattgagtggggctgtccagtcagatgcaacagaaggactgagggaaaagaaattgaaaaaagatagttgacaagtgagagagtagaagtgcttcattgtggggtcctatctgagtagggaaggaaataaagacaggaagagacacagttgttgaagaagaggaatgctttaaagttgaggtctcaatgttctaggctcacacttagtgatagaaagatggaggatagaagatggaattccagaatcgatgatgttggaggaaatcctgttctggtgatgccagggtctgtgctatggccactggcttttcccgtggtagcatttccttggagaaggtcaaggaacttgtgttttgcggctcttcaatcggcctcccatatggacattgataataatagctaactttctaggactacctattctctgccaaacagtgtaacagatttttgcatacgttacttccaaccattataataatcctttgtaaggtaaatactacctttttttttttttgttacggagttttgctctgtcacctgggctggagtgcaactgtgcgatctcggctcactgcaacctctacctcccggattcaagtgattctcctgcctcagcctcctgagtagctgggattacaggcacctaccaccacacctggctaatctttgtatttttagtagagatgaggtttcaccatattggccaggctggtctcaaactcctggcttcaagtggtctgcctgtcttagcctcccaaagtgcttggattacaggcatgagccaccatgcctggccgatactaccattttcattacacccagaaggttgagccaatctaataatctgtccaagattgtatcgctattaatagtaaattctggagatggaattgatattcaggtatgtctgtctctaaggcctagcactattcacttgctgaattccgccatggactcccaaagccccatcctcccagtttctgtttttcctcttcattcctttgtttttgccttccttaatttaaaaaaagggcgtaaaacgaacaaaaacatgtaatatagcaggattttttttctttttttttttattatactttaagttctagggtacatgtgtacaacgtgcaggtttgttacatatgtatacatgtgccatgttggtgtgctgcacccattaactcatcatttagcattaggtatatctcctaatgctatccctcccccctccccccaccctacaagaggccccagtgtgtgatgttccctttcctgtgaccaagtgttctcattgttcaattcccacctatgagtgagaacatgcagtgtttgtttttttgtgcttgcggtagtttgctgagaatgatggtttccagcttcatccatgtccctacaaaggacatgaactcatcattttttatggctgcatagtattccacggtgtatacgtgccacattttcttaatccagtctatcactgatggacatttgggttggttccaagtctttgctattgtgaatagtgccgcaataaacatacgtgtgcatgtgtctttatagcagcatgatttataatcctttgggtatatacccagtaatgggatggctgggtcaaatggtatttctagttctagatccttgaagaattgccacactgtcttccacaatggttgaactagtttacctcccaccaacggtgtaaaagtgttcctatttctccacatcctctccagcacctgttgtttcctgactttttaatgatcgccattctaactggtgtgagatggtatctcattgtggttttgatttgcatttctctgatggccagtgatgacgagcgttttttcatgtgtctgttggctgcataaatgtcttcttttgagaagtgtctgttcatatcctttgcccactttgtgatggggttgtttttttcttgtaaatttgtttgagttctttgtagattctggatattagccctttgtcagatgagtagattgcaaaagttttctctcattctgtaggttgcctgttcattctgatggtagtttcttttgctgtgcagaagctctttagtttaattagatcccatttgtcaattttggcttttgttgccattgcttttggtgttttagacatgaagtccttgcccctgcctatgtcctgaatggtattgcctaggttttcttctagggtttttatggttttaggtctaacgtttaagtctttaatccatctttaattgatttttgtataaagtgtaaggaagggatccagtttcagctttctccacatggctggccagttttcccagcaccatttattaaatagggaatcctttccccatttcttgtttttgtcaggtttgtcaaagatcagatggttgtagatgtgtggtagagccaaatcatgagtgaactcccattcacaattgcttcaaagagaataaaatacctaggaatccaacttacaagggatgtgaaggacctcttcaaggggaactataaaccactgctcaacgaaataaaagaggacacaaacaaatggaagaacattccatgctcatggataggaagaatcagtatcgtgaaaatggccatactgcccaaggtaatttatagattcaatgccatccccatcaagctaccaatgactttcttcacgtaattggaaaaacccaaagttcatatggaaccaaaaaaagagcccacattgcgaaggtgatcctatgccaaaagtacaaagctggaggcatcatgctacctgacttcaaactatactacaaggctacagtaaccaaaacagcatggtactggtaccaaaacagagatatagaccattggaacagaacagagccctccaaaatgatatagcaggattttaaaaagaaatgagaaataagcattaaaaataaaaatttataagatataggatgtaatcaagggtaggttagcatacaaattcaaggtgttaattttatcgcatttactaggcttaggctgtaaaattggctttaacattttaagagcaagcatgaagaaacaaaaattacatgatactcagagttgagtaagactactcccagtactgagatgtgggagatgacaggccttgggtaatgggaaaaacatcatcattaggaagactctttataaaaatataataatatattttattgagttcttactgataatatctatcatgtaggcaaataaaattctgggagatttaaaataatatggttgagtacggttgctcaaagacaggttggaatgcaggtagagctaggcagatgccacatttttttcttaaagattggcagattaaatgacacctaaagatgggtagaaaaatgtcaccagttcatacacgtaaaaattgttccatgtggaatgatctgagatttggaatcaattactgtaatttcttcaactaagagttcaactccttcctgagcctggattagggctcatatccagaatatactaggacagatgtcctagtgtaatgtcctgctatgacctcgtgacatttttctactcatcttcctacaaagaagtaggatatgaagtctagagggatgagaaacgattgtggaattttttttctctctgtatttttatgtcttttgactagacatggggaggttgtttcatctcacaatctttagggcagtggttgtacaaagttagcatgcattttaattactcaaaagcttattaaaacacagattgctggtcctcaactctaaactatctgattcagtgggtgtggagtagggtatgagaactgcatttttaacaagttcctaactgatattgatggctgctggtcagaatgcacactttgagaaccactgctgtacaaataggaaataaaatgaaattggataataatttagaatatttaatgctaacattctaaattagggaaaatcctagattattttaatgtcttttttcctatatacccatatcctcattgaaagtagttttgacagtaaatctgatagaatttcagtttgttgagatggagaatttgttcttgcaaacttgatcatttacatacttataattttatttacttgagccaacccccttttcgttaatatcaagggtaaaattttatataacctgtctcaaattcataattaattgaaattgtaaagttttgcagggaatttttgtccccctaacacccccaaactgatctgttaattatctcaagtgcaaaagtgcaaagattctagcctctatctttagaatggtaataccaccgagggctatttgaataaaaaatggataatttcttgattagttacaatgctttaaagccatggtttctaagggtattgaagcagagaactcattttaatgactttatttcccaagtatcaaggggccttacatatcaattttttggtttaggataataattttggtgtattgtaacaacactctttttatatagtgttgatctctaaggagtgcttcactatttcttcatttttaggatatctcacaatattagtaactcaaatatttcaagttcatagagaatatgagtaggaaaatagatgactaagagttgtggtttaccagtttctcccaatttggcacccaccaatttgactcatatctaatgagagcataaaatagcctttatctttttttattctaaaaataaagtcattgaaaaacttgttgacaacaaaaaaaagattagagatctgaattatatttctccttggttctcgatacggtttaaaagctaacctgaacaactctgagaacgtcatgcatttactgggtaaaaacatgtgggctaactgggcttgcgaagattctaatataatactttctacaccagctgatagtggtaaaggaagtttcagaacatcaatattaatttgtgtccagctgatcgcctcatacggcatgctggtggctctgatttttctttttttaaaccttgttttaatgtctaataagataaatttctacatgtggaaaatattaaagtaattaaaaacatttggcttttttgcatatattttctaaaattaacttacttgttaacactcatctctcttgtctctaattgggttgaaatgtgtgaaaaaaagctttgatatggaactgattttcaaagtatggctcaactgtgatacacatggaggagccaatatatgcagctttgaaaaagtttctgatgtcagtgtttttacttaggtggcataagatttgaataagaagttgctacatctcaataactaaggtttctgttatcatttggaaatctaagcactatcactttagagctttgagttaaaaggtggtactccaaggtctgcttctgaagaaattgtttctcttttttctttaaaatattcatagtgttggcctggtgctgtgactcacgcctgtaatcccagcactttgggaggccaaggcaggcagatcaccttgagctcagcagttcaagaccagcctgggcaacacgacaaaaccccatctatactaaaaaatacagacattagctgcgctttggcaactcatgcctgtagtcccagctacttgggagggtggggctggagaatcgtttgagccctggaggtggaggttgtggtgagcccagatcgcaccactgcacttcagccttggtgaaagagtgaaacgctgtttcaaaaatacacacatacatacatacatacatacatacatacatacatacacacacacatacatacatacataaaaggaaatattcatggtgtcatctcatttcctagtaaagggggtggggctatatttagtaatttgtttttctaaaggcagataaatactatcctcctttcaagtgctctgtagctggatggctttgtttgactttctttaaaattatttttaaagtgtgagcacacataattttatataatatcttcatcagatttaaatgatgtaatttaggtaactcttgcaaaggctttacatttttttaaaaatgtaaaccatccttactctactatttcaccatagatgaacactcagtacattgacacagcttatactattttttgaaggttgaattttacataaaaacaaggttatattctatgcctgtggaaaagttaatattcatttctttcctgtcatcctgtgagctttattaaaactgctaccacctgtcagcaagaggtagaagagcgtcataatgaaaggaattgatgctgaaatatctttctgaagaaaaatagaagcagcttctttttttgacttgtgatatttggggcctcagctaatcaacgttgcagaagtttgagatgattggaaatcttaatggaggcaaatggagccatatccaggcttgatgggatctgaagcatataaaatttgggaggtttcctttaaagaaaaacaaaaacaaaaacacaaaaaaatgctttcctttagaaatttataaaacttctaatggaaggtgttggattctctcctggggccctctgggcaggagaagcccttaagcttaaacttctttaacttcaaggtacacactgccttttgggcaaagaggagaaatattagttctgcctatgggcatgaggtggtctccaaacttccctccagatctggcccaatttttcaaaccttcaatccctactgaaaataagttttatttctgctatagaatttccaccttgtcttcttcagtcctggtttccagtacatctgtcttataacttgaaatctctgaataaaacttgctgagtaggtattttttaattggtagatgatgagttgaccaaaattcagcacttggccaaaattgctgaaaattgagagaaactgtcatggatgtagttgacaattcattggctttcttcatgttttaaggtagtattaagataacacaccagcaagcaaagtatcttaatcacattatccctgaagaaatgtaatcactgacttaaaatttaatatttcatattatagaggctcaacaggagaactctgtgttggaacattatttccataatacatcttgttcataagatctgtgatgtcaagggctatgtattcatcctgctgatcccaatgtcaaatatgtcttactagatatttgcttcacaagaaagagaagtgctgtgtttaaaaatgtaggctttggaacttaaaatatctgataagcataatcattacacaccagggttacttccttatatcatcctaaaacatttaggaaatgtgctcattttatatattgagaaagtaagattatctttaaaagtgtggattttggagctaggcccagtgcctttgactgtattgcttactttctgctatggggcaatctttatgtctttatgattccattttctcatttataaattgaggtatcttaaggttatgatgatgattaaatggtataataaatgtgggctacttggtaaagtgccacataagtaagccctctgaagtgtttacctattgctgcagctgtttagccattgattcagcatcatacaagcacacatctaatgaattcgtacttttagtgaatgaataaaaaatggtatctttataaactcgaatgttgccccttgttaattttctaacaaattagaactgtgaaacccaacttattttcatttttgccttagagatcagtaagcttagaacgaaattcattattccaatggtgtaacttgttcagttcaattctaggaacaactactactttattttcttcagttgatccctattctctttgatcctttaatttctgattttatgtcatctccatccataaatcactgccaagccttttgaaaggggtataatttatattaaatggcctatctcccattccctgttaacatcttgaccatgtacaattgcgtgccgttctcatctgtgaggttttagttgtagcatggattctttttaggcttaattggaaaagccgtcaatcctgtaaaccacctacgacatcccacagtgtactatacaggttaattttccatgactattacaatttgtgacactggtttaaagagcaaaatccaaattatctgcttactaaatgtataaattcagaaaatgacatcttttcaaaattcttttaaattttgggtaagtttaggtaacgccaaaagtcctattcggtattttagagccaaaatctagacagaaggtgtaatgtaaaacacagttttgtcaaaacactcagaccattggcttatttacctgcttgtagtttatattaaaaagtaaattatcattgaatgagattttaggtctttctgaaaatgagaaatttccattgaaagatatggctagtcatgtttttgttgcttaagattttatagctggaaatactgcattttaaaaatatcttcagtttttcatccacattacagctaggtgctcctaaatgtgttgaaagatttctattaatatatggtattaaatgattcataatttgaagactcttaaagttctttgatcttatagctaaaaatactgcaggtattatagttactagaaaaaatttcccattctatactggcttgtctattatctgcagcttacttagaatttttaaaggacagtataaataaacggaaccccccaaatctggtacttgactgatttgactggaagacccatggcctagttccagctgtgtaatcagtagctatgtgattttgaccaaataagttaacatctctatgcctcaattttcttatcaataaaatgaggaaagttgggctaaactgattcctgagatcccattcagctgtggaagcctttgattctcttgtcacaaagcagcacacaatgaaatactttattcaaaatgaaatggtgagccaggcatggtgggccacagctgtaatcctagcactctgggaggctgaagaaggaggattgcttgagctcaggagtttgagatcagctgggcaacgtagtaagacctcatctctaccaaaaaattaaaataaaataatataaaataaataattggtgcagtgttattaagcattggcccctggaatatatccaaaggtcaggaaagaagttcacaattctgtatagtctgcatagctgcagccaggctggctgatgcaagtgtctgtaaagttactgtggctttctatttgcctgctgggattctagcattgaggatagcctctgaaaaacagtgccactatgagccagtttcagttccattgaaggaaaaaatgatttgagaacctcaaaatgggatccatggacttctgtattctaccagggctcagcaaatacttcacaggtgatttggttggtagggatgaaaagaacgttgagacagctttgttcacatacattcttcaatttgaaatgttaattattatgacaggcactgtagcatgtgtaatcatgaataattataagaagcaataaagctcataatgttaaagagagggaactcgaaaggcagtcttcctgggtttaaatctgagcactgtctgtcaatagctttgagagttcaagcaagttgtttaacctctttgtgcctcagttccttcatgtagaaagtaagtataataatagaacctgccttataaagttattctggaaatcaataaattattaaatgtaaaacatttagaatgtctggcatgtaaattcttcataggtgttatctattgttattacattattttcacagaaaatatttaatgtttgcaatatcaggaatagatttgggtacaaataactgaaaatcctaagataataatgacttaggcacaacaagatggctgctaaagcacttcccttttaaacacaagttttagaagtcacatttgaccatttggtttacctcttcttgaccagaacttaattatgaggccaaataagcttcaaaggaagatgtaaaatgtgcaatttaatctatggggctatgtgattagttcaaaatataatggctttattattgaggattaaagagagaatattgggaaacagcatctttccacaaatataattacattttgaaaaccgagttcctcagttttctcagttaagggacagcttctttgccaaactgttcatattatttgcatatctaaatatttaatttcagttattagtgttgtgttatttaattgccttgcacgcaaaaaatggactgatttctcaaaaatgattacatggcaaaaatagaattaaaatattaacatcagaactccagttcaggcactaaatttaaattgacataagttggtagaaaggactctgctagtgccataatttaggggaagctcctaactacggaaatgtgtgaataggaagtatggcagtgaacactagtgttcagatttgattggactgatgatctactgaccccctagtcacctgttaggaaactgtaaaaataagctacccaaatatgaaattgatgattcttttttcccgaaaggcagaagttaaaacccttcagatgtcatttagaatttcaatcctttgtgtgacacaagtcacattattactgagaagcttgtcaaccaacccaaactcttacgataaatgggtgtagaggggaagcagattaattattggcaaaacctctttgttaaatgacattttttgttcaatgacacatcacacattagtagccatcaatgtgtaagtacagtcactattttatgtactaatatttttctcccagtaaagcacaagaactggggtacagagactgaatcacagttcagaatatattaattacatgcattcattcatttatttgttcattcaacatacattttttcagggccaagagttattccaggcaatggaaatatggcagttaacaaaagaaataagctcttaccatcatagaacatataattctaatgacagagaaatgcttgatgacttttaccactatttatctcttatgaccctgtgttacatgaaaaggaagtgattgctgtgagcattcttgtgtaggctgagcaaggtgaattaggatttttagagagagtgaaacagtttttggttggggcaagagtagcattgctatgtatataagagtttacctggatacttgtctatcttctgctttacttccaagagcatttcctaatcaatagtatacgtcctggtggtgattaagagatgaaggaagtagtcaaaattgtgactaggatggaattgcagtcattgagtttctatgttagtgttctgggcaaagaaatacaatacagctttctccctactccttcccaatggcaagggggtcacacaagattacctgaaatatggaataaaaacatctttttatggacagtagattgactcttttttatattaagtggcatgatcagttggtgtttctttatgatatttagtgtcttgagtagtgtggccctatctttgtatggctgcaatattactgtatttaacattaaggataaattattggagattttgaagaagactgaatagtgatacaaatggttgttaccaagagttatattttttctccattatttgattttctttatttgaataaataaatcgaatagcttatgtacaaatcagtgcaaatgctgcagcaggatataaaagtgcatttctttacgttgaaggaaatggttagctttgctttaaatgtgacgagtttttcaactgaaagtagacataagggagaagtctctccataattcccaggtctacatttgctccaaatattcccaactctctgagagaggcacgccagacttgccgtcattcctaatgttttataatggtaaagaagggctttctaatttagatgaaatagagtaagaaaagaaactgaatggatatggaatccgattttttaaaaattttagatttagggggttcctgtgcaggtttgctgcataaactgcatgactctgaggtttgggcttctaatgatcccatcacacaagtagtgaatagtgtactcaataagtagtttttcaacccttttcctcctttcttccctcccctcctttggaatctcgtgtttattgttccatctttgtgtccatgtatatccaatgtttagctcccactgttaagtgagaacatgcagtatttggttttctgtttctgcattaatttgcttaggttaatggccttcagctgcatccatgttgctgcaaaggacatcatctcattctttttatggctgtgcagtattccatggtgtatgtgtaccacattttctttatccagtccaccgtttatgggcacctgggttgattctatgtctttgctgttgtgactagtgctgccataaatatatgaatgcaagtgtcttgttggtagaatgatttattttcctttgggtatatacccagtaatggggtttctgggttgaatagttgttctatttttagttccttgaggaatctccaaacttgtttccacagggactaacctcatttgcattcccaccaacagtgtgtaagtgttctctttcctccacaaccttgccaacattctttttgaccttcttatagtagccattctgactagcgtgagatggtatctcattgtagttttgatgtgcgtatctctgattagtgatgttgagcattttttttcatatgtttgttggctgcttgtaggtcttcttttgagaagcatctttgtcctctgcctactttttaatggggttattttggaatctgatctttggctcatgtcagataaagatacctttgtgaaagattgcaaacagcaaatctcttgctgatatgaaactagcgattttaaaacttttaatttttatttaaaattcagatgactttttttaaacaaaagattggtgactgtatgctgagtgcttttgaagtagtctacaaatcccttcagtttgagaaatactactcttggcagaagaacagaaataagatacataaaagacaatatgaggaaacaagaaaagtcagagttgggcatataaaacttcagggaatagtggtgggcccagatgttgtttaaggagtaaatgtaaagtttacaagtatttaatgttctggttatctgtgaggtaacaaaccacttcaaaacctaatggcttaagatgacaactatttatctcacaaatctttgtgttggctgtgtgctgctttgttcagttggggccacaccatatgcattcagcctagcttagcagaggcctcttggttttcctccatgtggcagtgtctcatcctccagggcctctccaagtggtatctctctagttggacttacttttaaagcatggcagctgagccccaagatgggtgttccaagaaggaaacccgaaagctcagtgcttgcttaaggtcacttggctaaaacaagtcatgtgcccaagcccagagtcagtatgagaagcacaaaggcatgaatccctaaggcatgtttcactgggatctaccagtgaaacagtctaccacaagtgtggaaagaaagaagcctgtcattgcaatgtttatatttcttatcaaacctgaaggacattctatcttggaaatgggacaagttcacactgtgatggtttgaatgtctatgaatgtgataatcagaatattttaaagcagtggctctcaacttcggctgcacagaagaatcacttaggggaacactgaaaactgcaggtgctttagattgcaaaggccaattaaataacgtttctccaggtatgagtatattttaaggctctttggcagatttctaaagtgccatcaaagttgagacagcactgttgtttctgagattgacttgaaggaggacagccatatattttctttgcaccactgttagaatgcttgcttagatgtgcagtgaataaaggatcaagcgtggcattctttatgattcttgtttggctccgtggttatgatttcttccagtgagataccatctcaatcatatttctccccttagaaccctaaaatagttaagtattttctcaagtggccttacaatatttcttatggatatatctgatttgagttcctcagttgtccttctctgatgttcttgtttcttattcatatctcatatagacttgtcacccttctgtgtctgtgtcacttcaaattatttgatccttactgtccttccacatctcagtcagagcagatgccttcctaatatctaagctatcaggcactttttcctgattgtccttcttcttgtaatgttctcataataattcttcatgactgcagttactcaaatgagttctataattcaacacctttttggttcctctgaacacataaaattaaaatttaaatgcataaactttcctatctgattggccacacctttaagttttttgtagtgttaatttatttcaaaatgtagtatgtatacctggtaaagtaaaacttttcaaataagtataaattaaaaaggaaatctctttccatggcgcacccacagtttcattccatggaggaaactattagtgcttgtttgtgtattcctccagaaatgtttttatataccataatatacatatttaaaaatatagcagtgtttttaagcataatgtattgttttgaacctttaaaattatttgatatatcttggagattttgtcatatcagtggttttaaaaatgtcattatagttcactatatggccataccataatttatttaaatgttcctctgttgttaacatttgcatgcttttaagtgttatttccaacacatatctttctgtaaatgtataaattactagtggggaattgctgggtcaaatagtctgtttccttggattttgatacctattgcccaagtgccttccaaagagatgccactaattttatattcccacaactgtttatgtgattatacctgttttcttatatcctcatctgcatctgcacaggatttaaaccaaattttattttttgctttagtttaggcctttactatctcttgtctggtctaatgtaatctgttttttgtttaccctcttatagacattagcagagtctggaacatatagaagattacctatgaatgttagaatgatagattttactgaattgtaggacataaaatttctgcttttgttaatcagtaacaaatatccaatgaaatataaatactgcatggtattactctgaaaacagaacccatgctgagcattaaagtagccaaatagtctaacaggcattatatgttttttaattagtttaagtttttatatttttgagttaaaaatcccagcaaagtcctagaaataatgcttgtatgatatttttcaccttagtgggttgtaacatactcaaagaggaagaatacatgaattttcattagaaatagtgatatgaagagttgatatacatgaaattaatatttatttttgaatcgtgttaaaagcatttttgcttgtattgatttttgtggggattttctcttgtatacaaacaatggaataaatcatgacaaaaagcttaacatatgtagtataatatttcataaagtcagaagaaattatagcttatataatgaaaaactgacattgagcagtattttattatattgtgattaaaaaatcatgactttacaaattacatttcatatctggctcctgtagtttttcttttaatatattgaaactgttttattaataaggaagtttcaacttcttgggaaccctttactttgaggcaaatacagttttcctggttcattattaaacttatctctcttttaaataccttgccaatttttgagagtggtggaaggtgtggaaagctctatgttctttagagtttgaagaaatatttattgtgttaggtatattaatagaaaattatttacttttcgtaggtgaaagtactgtgctataaaatgtctctccttttcaaaatttgcattatccatcattaattcaagtgaagtagtactttcaacatggaattgtgaaactgaagttgttcactttctatttagaagttacttctgttcaaggatatttctttttacctgttgcagaagagcatcttaatagctgccacatttgttgactattttctatatgccagtatttgcactagacattttacagatattcttttatttaatctttacaatagaacctttaaagggttattattgcatttatggctgacaagagtaaaactccaacagattaagtaacttggccagtgatgacacaaacttgttaggggtggagctgggatgcaaacctaactccaatgtccacaatcattgtatggccaaggatgactttcatgggattgaattttagccaacagatcaaaattctaaagaatttattttagtgtttcatcatcttctcaaaccttcagcttcattaaggttcagtaattaaaaatgggaataaccacattttatgatccttgttagaatacagatcactaaaaggcacaccattcagtttccttgctgaaagagtagtcaccaagatagtctcctaagttgagagcagaggcagatattaataatgtcaagttgctcaatcagtccttaagctgtgtggcttttaaggaattggattcaagaatgtgaattcagttgtgtggccacttctgggttggctatattttcccatttattaaattcacccatagttgtttttttttaaataaggggagcttgcatttctacctaaaaattacaaaaaaaaaaaatagatttttcatggtttctttgaaatgtaatttcttaccatgatatcttcaattatcacagtttagatgtattacaatataaaaatctttgcttagaaagcttacgtctttgaatgttcatctggattttatgttaagagaagaaattttcctttattttggctttaatgaaagaccatgtcaaacagtgatttatctgacatgtaaatagttataagccttgttttaattttatattttaaaacacaaatgtagtccgtggtatagttataatatgcattatatatgttgccctagtgtcatgatatttttatgaatcaggctttcaatttcaaaaatcagcttttgcttttttatgctcctgggttggatactgtcattgtctttaatatctaaggaaaatgtctcttcttgccattgagcccacaattttctttttaaaaaaaatcagataatgcttatatattgaatgataaagattttcttttcttttccttctttttctatttttttttttttttttttttttgagatggaatcttgctctgtcacccaagtcggagtgcagtggcacaatctcggctgactgcaacctctgcctcccaggttcaagtgattctcctgcctcagcctcctgagtaggtgggagtacaggcacgtgccaccatgcccagctaattttttgtagagatggggtttcaccatgttagtcaggatggtctcgatctcctgtccttgtgatctgtccaccaatccacccggcttggccttccaaagtaataggattacaggcatgagccacggcgcccaacccgaatggcaaagattttctaaagctagatcagataaatttctagcagctcaagaggcaggatttctatgaagttagaagtaaatttaaatttaagccttgattcatctatagacagatatttgcattgaattaggaattaggtgtacattgattttttaaaggtgtcaattaaacagtatgggaattggagttttaatttgtttcttttaatgtctcaggtcaggcaatgactttttcccatttgttattgttttgaatcttatatgttttctttagtgtgatgattagggggacttaactgccagctgttcatctttcttttttctttttctttttcttttttttttttttttgagacagagtttcactcttgttgcccaggctggagtgcaatggcacgatctcggctcaccacaacctccacctcccaggttcaaacgattctcctgcctcagcctccctagtagctgggattataggcatatgccaccatgcccggctaattttgtatttgtagtagagacagtgtttctccatgttggtcaggctggtctcaaactcccgacctcaggtgatccgcccacctcggcctcccaaagtgctgggattacatgcgtgagccactgcgcccggccttgttcgtttttctttacttgacaattaggttccctctattgccctctgcctcatattgtataaccctataacatagctatatgatttcttcctaaatatgcatctcagggcttgacctaccagggacagcatggattgttaactgctttccgatgttgacagcactgctgttgttctatccacctaaatctgatttagctaaaacaaaggcagtatatctgctaccttaagttattatatatagattcagtttgctttgtgtttgttcttttaatttggttttacagattaaaggtttgactctatctgattattttgtgtaaatgcatttttcaggtctgatgcataggcaactttgcctaaataaattagcttcctggctggattagcaaaagactcaaaattcttcaaaatataggagtaatttttttccgaagagctactaaagtggtttccattaaactggggaaaaatgaatattaaaaaaaggaaaattgatttataaaagattatagcactttctgaacttattccatagaggagataaacagtgcatttttactcccaataatagaagtgactgacgcatagcctcagttttttcttaaaacatgtttcatgtgcacataatgccagacagtcctgaacaatatgtggagcactatcaaggataattctcctgtttaaacattgaatctcctgtgcctggtgtatatatgtgataaatgcactgtgccatttattcaccttcaatacatgtgtatttttattttggaaagataatgtgtatgattgttgattagaccaacttttcttccatgcttatagaatagagtgaaatttttaatctatgtaatacttagaaaatgaatatgtggtctattcttatgatatttacttttttgagaccaagtttcttttttgtggaattgtagcagtctctcattgcctgaggtataccctaaattctttgtcccatgaccaagaaaattaaggagtgtggacactaagggtgaggctgtagcaagagtttaatgagtgaaaggagaaagctctccaccacagagagagggccccaaagagggttgctgttttacagttgaatatagaggcttttatgagaaatcagtgaaagctgggcatctcatttgcataaggcatgaatttctggtagctccaccgcatccttctagtgtgcatgcaagcccttagcttgagttactccatagttactccatactgctttgtttcctttaaggtacatgtgtcaggggatggaattttccattgtgagcatgtctgggcaaatctcctgtgtagcctttcttatctatgtggcagtgggcatgtcttaagcaagttcccccgtgcaaattcccttttctgtgcctgcagcttgatttctaagctcgttttttgtttgaaagaattttaccgaggacccaccctaactgcctgcctgaccatttccttcctcctctctcagaatgatttcttcacagttttgatagaagttttactaagattgaaagaaaacaaactttgaataaatagatgcacacaccatgtaactggatgttagtactgaattttatcatgatattaatctgggcaagttggctacctgaccagcaggctgaatctggcatgcatgcgtgtgtgtgtgtgtgtgtgtgtgtgtgtagttaattttttaatttacatttgaaataggcttggacaggacaggcattctgcagctgccagttacctccatattctcttatataaacctcatatttaaattcattccttccctcctccctcctgcgctggctcttagattcatttgagtttttgacagttttgtttaaataaatctaggaaggactgatgcatttttttttgtaattctgattaatattccagtgagactttagagaagggaaggaacaaatttacaggtcatctggatcatttaactcttagagaaaatagttaaatggagatttaccagtgtattttttaaataagcaagatgggatttggttaactgagagaagaaactaccttgcaatatttagctggcttgactgcaggataaaacagaggtcagtacatttgtttcactgagcagatggtgactgcacttgttctcaaagtgtggttgccagaccagcatcagtatcacctgagaggttgtttgaaaaatatttagccccatccaagacctgctgaatcagaaagcctggggttggaggccacagtctgagttttaacaagtcttgcatggtgttcttatgctgtctaaaattggagaaccactcttctgctgaatcttcttgctgcaagaagatcagtggaagacgtggtgttccctggattgaagaaatctgagttctgatcttaacctagcctcttgtcagctgtgtgaccatgattcctctagatccatatttcctaattgcaaaacaagaaaattgtgttatttgactttcttccaaatagtctgaggcattaataatttcaaaagtcttttatagtattatttcttcaaaacagcatattttggtttctttcattcttctctcctattgctatgcaataaaaaaaaattcagcctgaaagaagtaccatttaattttcttttgtttaaggggctgtgggaaattgaagtagaacatttatcaggtgcccttaggctacaaactaataatggaggaaatggccctgaatcttcctagcacctgtgggccttgccttagaagatgcctgacaaggacagttgaaatatttagtggtacttgatgtgctagagtatgaaaccaagtgtaatttcagcaatttcgagcccatcgaacttgcctagctagtgcagttagtatagcccacaaatggttatgaaggaagcagttaatagtaatggtttcctgtattacttggcatattttgaaagcaaattaattttaaaattttacttttaatgctagcttatttgtgattgtctttcctcccaaacttgatacttgaatttgtattaggtttccacttttaaggcaattctatatattttgtttcatattattgccagtgaaagctatcttatagtattgttagaacagtgaaacagaggtgaaagttctcctgctttatctggtcaatacccaacaacacctagaaactttcttccaaatctcactgattgattttatgttaagtagtacttaatacttatgtgtttaaaatacatatcagtacttacctgttttaaaaatatttaatattctcattataaaaacagtaactacccattgtagaaaattcaaatattattggggtacataatataaaaagtaaaagtcctttggaatccactttctctacttttgcccaccacccatggtaactattgtcattagcctgaagtttgtcataagttcctttatatttttttctaaattgcactgttaaaaattttagtgtactatactcttaatgtactattgctataccttatttcatattacattcacagtcaaaattttgatttccttgacaaatctaagacagaatagctagcatattggtgaaattttgaattcatattcatcctcataacaatgaaatgcagacatcagtgctgttataaataaaaaccagaggaactaaaaaaaaatttgaggaaataatcagcaaactaactttgttatgctttgcaaagtaatttttctaaagcttatgaagttgaaatatgcccttttgtaaatcaaaaaaaaaaaacaaaagcaaacattagagattatactgaggaattgattgaggtaaaatattatccagattcggtttagaaattaatggtaatatttctgtaggaaggtctggactggagtattctgctctctgctgtttcttgtattttctttttctttttttttttttttcacattttttattttatttttttatttttttattatactctaagttttagggtacatgtgcacattgtgcaggttagttacatatgtatacatgtgccatgctggtgcgctgcacccactaatgtgtcatctagcattaggtatatctcccaatgctatccctcccccctcccccgaccccaccacagtccccagagtgtgatattccccttcctgtgtccatgtgatctcattgttcaattcccacctatgagtgagaatatgcggtgtttggttttttgttcttgcgatagtttactgagaatgatgatttccaatttcatccatgtccctacaaaggacatgaactcatcattttttatggctgcatagtattccatggtgtatatgtgccacattttcttaatccagtctatcattgttggacatttgggttggttccaagtctttgctattgtgaatagtgccgcaataaacatacgtgtgcatgtgtctttatagcagcatgatttatagtcatttgggtatatacccagtaatgggatggctgggtcaaatggtatttctagttctagatccctgaggaatcgccacactgacttccacaatggttgaactagtttacagtcccaccaacagtgtaaaagtgttcctatttctccgcatcctctccagcacctgttgtttcctgactttttaatgattgccattctaactggtgtgagatgatatctcatagtggttttgatttgcatttctctgatggccagtgatgatgagcatttcttcatgtgttttttggctgcataaatgtcttcttttgagaagtgtctgttcatgtcctttgcccactttttgatggggttgtttgtttttttcttgtaaatttgtttgagttcattgtagattctggatattagccctttgtcagatgagtaggttgcgaaaattttctcccatgttgtaggttgcctgttcactgtgatggtagtttcttttgctgtgcagaagctctttagtttaattagatcccatttgtcaattttgtcttttgttgccattgcttttggtgttttggacatgaagtccttgcccacgcctatgtcctgaatggtaatgcctaggttttcttctagggtttttatggttttaggtttaacgtttaaatctttaatccatcttgaattgatttttgtataaggtgtaaggaagggatccagtttcagctttctacatatggctagccagttttcccagcaccatttattaaatagggaatcctttccccattgcttgtttttctcaggtttgtcaaagatcagatagttgtagatatgtggcattatttctgagggctctgttctgttccattgatctatatctctgttttggtaccagtaccatgctgttttggttactgtagccttgtagtatagtttgaagtcaggtagtgtgatgcctccagctttgttcttttggcttaggattgacttggcaatgcgggctcttttttggttccatatgaactttaaagtagttttttccaattctgtgaagaaagtcattggtagcttgatggggatggcattgaatctgtaaattaccttgggcagtatggccattttcacgatattgattgttcctacccatgagcatggaatgttcttccatttgtttgtgtcctcttttatttccttgagcagtggtttgtagttctccttgaagaggtccttcacatcccttgtaagttggattcctaggtattttattctctttgaagcaattgtgaatgggagttcacccatgatttggctctctgtttgtcttttgttggtgtataagaatgcttgtgatttttgtacattgattttgtatcctgagactttgctgaagttgcttatcagcttaaggagattttgggctgagacgatggggttttctagataaacaatcatgtcatctgcaaacagggacaatttgacttcctcttttcctaattgaataccctttatttccttctcctgcctgattgccctggccagaacttccaacactgtgttgaataggagcggtgagagagggcatccctgtcttgtgccagttttcaaagggaatgcttccagtttttgcccattcagtatgatattggctgtgggtttgtcatagatagctcttattattttgaaatacgtcccatcaatacctaatttattgagagtttttagcatgaagggttgttgaattttgtcaaaggctttttctgcatctattgagataatcatgtggtttttgtctttggctctgtttatatgctggattacatttattgatttgcgtatattgaaccagccttgcatcccagggatgaagcccacttgatcatggtggataagctttttgatgtgctgctggattcggtttgccggtattttattgaggatttttgcatcaatgttcatcaaggatattggtctaaaattctcttttttggttgtgtctctgcctggctttggtatcagaatgatgctggcctcataaaatgagttagggaggattccctctttttctattgattggaatagtttcagaaggaatggtagcagttcctccttgtacctctggtagaattcggctgtgaatccatctggtcctggactctttttggttggtaaactattgattattgccacaatttcagagcctgttattggtctattcagagattcaacttcttcctggtttagtcttgggagagtgtatgtgtcgaggaatgtatccatttcttctagattttctagtttatttgcgtagaggtgtttgtagtattctctgatggtagtttgtatttctgtgggatcggtggtgatatcccctttatcattttttactgtgtctatttgattcttctctctttttttctttattagtcttgctagcggtctatcaattttgttgatcctttcaaaaaaccagctcctggattcattgattttttgaagggttttttgtgtctctatttccttcagttctgctctgattttagttattgcttgccttctgctagcttttgaatgtgtttgctcttgcttttctagttcttttaattgtgatgttagggtgtcaattttggatctttcctgctttctcttgtgggcatttagtgctataaatttccctctacacactgctttgaatgcgtcccagagattctggtatgtggtgtctttgttctcattggtttcaaagaacatctttatttctgccttcatttcgttatgtacccagtagtcattcaggagcaggttgttcagtttccatgtagttgagcggctttgagtgagattcttaatcctgagttctagtttgattgcactgtggtctgagagatagtttgttataatttctgttcttttacgtttgctgaggagagctttacttccaactatgtggtcaattttggaataggtgtggtgtggtgctgaaaaaaatgtatattctgttgatttggggtggagagttctgtagatgtctattaggtctgcttggtgcagagctgagtttcttgtattttcaaaataatgtggcaacgttctttgagagagtataccaggttaaattgctaagatgatcagtcaacaaatatttttggcagatctgcgatgcatgatgcgatattttgagaggtttgtgcaagatttttatttccctcctcctttgtaggaaaagatccactactcatacctactgacatcccctggcacttctagaaccagcttacaccccatcctctgctcacccttctcccaccttccacctgtattaacacctgacaggcacttatttccctatcaggagtctctgtagttgttttgccattgaccaagatatgtttagaacatttttaatctcttgtgcaattttggcaaacagcagcctgagctctgcttttcctaacaaataacttgcagattgtcatgtttctcttgggagaaggagaaaggttcaatcagagcagaattgaaatgatataaattaggcttattgtttagcaaatcgctggtgttaggtaagaattgtagataagaatagcctagaccctcttaaagatcagagcaggcatgtgtgcatgcatgaggaaaccaggcctttgttagtatcctttctgaaatggctattaaagtaattacagtaatttatagatttttttttcttcttccatttcaaaatgggttccattttttgccttttgtcttgagttcctcagttggagtgtgtatgtgtgtaagcatgtcttgggtagcactgccatagatagtatctatgaattatctgcacccaagctgatgaggtgtggtgaccacaggcactcacagatggatttgccagctttgctttcagggagccttggtcctttgagaataagagaattgtactgagaacactatgttttaatggttagttatagtttgtcatagcaccatttaaaattgctgtgttttatggacataaagatggcaacaatagacactaaggagtactagggcagggaaggaggggggcaagggttgaaaaactacctgtagggtactatgctcaccacctgggtgatgggatcaatagaagcccaaacatcagcatcatgcaatacccatataacaaacctgcacatataccccctgaatctaaaataaaaattaaaattaaaaagttgctgttttttatttaaagagacactttttcccatgtctttaaaaacacatccattcatacctatggattttattattatactttgttgcttttttatatcattgatgcttgtgtataagaatggcaatactttatgtgtatgacttttagagggagactttaaaaattattgatcacataagatggtatgtgcttattgtgcaagacctgtaattttaatatgctggaaagacaaaagaaattttatgcactagtctttttctgtatttgattttataaagtaacttgaatagtttcaaatcctaaggcttccttttaacaatatatgcttattttaccttgtctttgcatgaacaaaacaattagtaaaggtgactttcttcctaagaagttcattttgaatatggagattaggcaatttctaaataagccttagaattagtattgcttacaacagtagttattaatagtattatttatatataacttagttttgaatttaaccaaatgagatgtttactcacatacagacatttcacaaggcagaagacgtaacatatgttatttcccttctttaggagagtcagtcctgaaagagttaaggttttcttgttctggagatcaagcattgtaaccacagtaaccaatttactgttatttgcttagtcctagcagagaagaaaagtcagagtttggaaaaaagtctaattcatagacaagtacaactgcaattgatcccaatacattaggatcctgaactgtaattaactatttgtggttgtagggaccatggttttaatcaaatattttgcattttatttttcagatggtttgactcctcagcaacaattcaagtttaatgtaaagaaagtagaacacagtttatattttgcatttttgtaagggaacagttgacaagcacattttcaaggaagcagtaacagataggatttaggataaataatagaaaaattaaatgtacattacagaaacttcagttcctccataaaattacagtaatgttgagttttgtaaaagatgtgaatggtaaatttatgacttcccattgaaatgcaacaaatggaaaatgattgtattttgtatggtttatataaaacaacacgtgttacagctatctctaagaaatgttggaataagtaaatgagtgtatgctaactagagtggttagggcagttttgaagaaatataattttaaaattaatctgttccaagccccagctcctattctttataaattttctccctcaccttggatgctttatgaagaagttgattttattgttttgagtttacatatatatcaatgttaagataatttccctcttatatctgggagaattttgtgtaattgatatgggtagatttatgaataatatatttaacaataatcatttgaagtatttaacaaactggtaaaagataattttctttttaaaaagggcttattgagtattttgctttacttttaaatatatcagtgctggcttctatataaaatgcaccattttcctctctaccattcaatgaaatacagtttagagtctcttacggagtaaactggattagtcatctgcatactagaccttactttgcttagaattttacagtttacaaaacatttttgcaaaaacaatgcaaatatattgtttttgcaatatatatttgcaaatatttgcatatatatatattttttttcttagagatagctgtaacacatgttgttttatataaatcatacaaaatacaatcattttccatttgttgcatttcaatgggaatagtcataaatttaccattcacatcttttacaaaactcaacgttactgtaattttatggaggaactgaagtttctgtaacgtacatttaatttttctattatttatcctaaatcctatctgttactgcttccttgaaaatgtgcttgtcaactgttcccttacaaaaatgcaaaatataaattgcaatatatattcttataatctctactattgccttggacagtaattgaagccaacattatcgttttggaccagtgcagtagcctcctaacctctctgatctcctttcaccctgacttcctcttctcttccacgtaccccgctctcatcccagttagaatgaccctttagaatgtataaatcagattatgctacattttgctcagaaccatttaatgattttcgatctcacttagagtagaattcagagtgcttgtcatgggtgtcgaccctgcctgttcctggcctcatttttcattccttttctctaccttccttgactctggccatattagcttcagtgctgtgctttcaacttgtagtttccctaataggagtttttgtccctgtcttcctctgcatgccaatctctcactgatattccaagtctgcctggactcctcttgatttctgcttggatgccatgttgtcagagaagccttccctcaatgaccctgtctcaaatagcacctttcttcttctgtatctattatgctgttttgtttttctttattagcacttaatacttcctaacattatgtatttctttactgtcttccttccatgagaatccacgctctgtgaggatgggaactttgtactttgtcctcagaattctcaggacctaatttttgcatataatagtccatgtaattgtttaaaaaatgaaaattccaagaactaaggctgaacaggcgtagaaatcacattttcaaatagatgaccaggagcaggtttgggatatagtgtggggaggcagtttggactcagcaaatgctggttattttgaattattttagacccttctgattgctcatgtattgtatgacactttttaaaatctgtatttatggataacattagggacaaacacctacctgtctctagtgtcttctctcccacttgtgctactagcctactttttgattgctcttctcatcagatatgattggaatcatcttttaggaaaatacactttgatttataactcagaacatagtaagaatacctttgcataagccctactatgaaaatgttatgattttattgtggtctgtatttctaagaagttacccatagccggaatttgctcagtatgctttctgtcttcttgggtgtatttcagtattactcttcagttattcacacttgggagtaagggcaaaaaagtgtgccgaatccttccagtaagaaattgtggcatttctcagtgctttcacagatcagcaactctttccgcttatgacagtattttgggaagaaatatttcactgaatgttctctatatgtctaaaaatgccaatgtacatcctcagaatgggtaatttcctttctaacacaaatagctattacccaaatgtctggatttccacaagcctgaggttctcaaatcttcctgattttgtttatggaggatgattttgttgggtaacttaaaaatccaggggttaaagtaactttgttcgtaaatacggataaaaaaagtgtcgtataatacgtgagcaatcaggaaattaagtgtactgcataaaagtatgttttagttatcagaaatttaatcactaatcttggacagttttataaaatttcctcttttcaatgaagtctgttatattaaatattgatcatggatctagctaataataatgatagtggtaataattgaatggtcaggtgacagaaaccatcctaagacttaacaaaatgttatctcttttaatccccaaaacattttataaagtgaatcctcttaatcctattttgagttgaggaaaatgagatttaagcttctttatgtaaatggagctggaggagccaggattggaatccaggaactcctaattctcaaacccaggatctctacacaaggaaacctccatgacttggctgaggttcttaatgatgatcccattttctctgtcataatacagtgctgccttctgagtctactaaagcatgtaatcctctttgtttacctccccattttaaagtcccagatatcaagtaattctgcttacttggctgtctcttctagttatttcttagggcttcagtttctggcaggtgccctcaatgtgtagactctgttagctccctgtcatctgaggagaggaatcaaataaacaccatggttaaattagggaggctaattttttctatttaaaaatctttctggcttgcaggtttctccacttctcttgggaaaagttttatgacagcatgtttcccagaagcctgcatgctggagcaagaagcagcattgtcatatttaactcttctaagagaaatttacttttttcccacttgtttgttcagcagaaattctggaatttatgtggctttgctagctagaaaaaactcttccagtaactaaatatgtggtctgataatctcctgacatacagttttcttcttatttgaccttttctttaaggaatattattgaatgacacaatctcttgagaaattttgctgaaatgctgagataggattctatagatagcaattacagctgttgatatgttttctagctttgggactaatgtgagtgagttacaaggggagttgaaagccttgagagtttacacgtgtggtttgatgggatgacaagcattaattaagatttttaatatggaggtgatttattgaaaatagattctggatgaactctttggcctcagaggtgaggtaatagaataatttcctctttaagttacctgtataagcacagaatagattattagtgatggaacatcttcatcattctgtggtagtctggctgccagatgtgatattttattatattagttagttcttaagtaggcaagtggccatttctcaaaagcagaattgtgtggatatttatgactccctttccaagcatattccttttttccccgagacatggcataattgtaaaactttgccttttgtataataaaacttgcctaccgttctgtggttagggttagggaagtgggcagtttgctaactatttgcctggggtctggtaggaatttaagttgaaccagaggaattcggatatttgggggtttgccttcaagaaaaatgatgcctcttctcttacctccacctaagggaataaattctaagcccaggagaggagggttatgttaaatatgcctgggccatggcccagagaccgcaaggagaggatggcatacataatgggggtgggtaaaacaggagtgtgtatgtgatatggaaaagagaagtgagtagatagcaatgcctctgtgagaacaagaaggaagccaaaggattacatctgaacattgcatgatgtatccttggcagcagctttgctcagtgaagatgataaataaacctaatggtatgttcattcctgttgtagataaagttcactttcagattggtgaagtctaagaattaaagtccagaaaaacaactttgaataagttgcacagaacattatcagtttacccagtagagaccaaataactttgatggttagaaatcatttgaaataggagtagacagatcattttttttcccctggagctagaactcatttaaatatactgaacatttaaaagtattgtgccatctggctagcacccagtcctcctgatttcaggccaataatctttctgctacactactttaatgtgtatgttggggctgtgggggtcaaggagtcagagagagagtaatgaaaggaaacataaggtttatatgaatttaaaagaaggtgactaagaacatgtgttattctctactcttagatcatcatccttccaggcatagtggcccatgcctgtaatcccagtactttgggaggctggggcaggaggatcacttgaatccagacttagagactggcctcagcaacatagtgagaccctgtctctacaaaaaattaaaaaaattagccaggaattgtggtgcatgcttgtggtcccagctacttgggcagctgaagtcggaggatcacttgagcctgggaggtcaaggctgcagtgagccatgattgcaccactgaactccagcctggtgtcaaagtgagccactgtgatatgctttggctctgtatccctacccaaatctcatcttgaattgtaatcctcatatgtcgagggagggaactgtaatccccacatgtcgagagagggaggtgattggatcaagagggtggtttccccattctgttctcatgatagtgagtttcatgagctctgatggttttataagtgtttgacagtttctccttcacacactctcctgctgccttgtgaagaggctgtctacttccccttcagccatgattgtaagtttcctgaggcctccctagccatgtggaactgagagtcagttaaacttcctttgtttataaattatccaatcttgggtagtatctttatagcaatgtgagaatgggctaacacaccctctatcaaaaaaaaaaaaaaaaaagatcgtcatcttgttcctctatattctgcttccttgtggtcttattgaaattcagagttttgcaaaacatttcttgccaacttggatgttatcatgtggtcatttagtctgctgataattgagagccatttaatattttgaagcagtgaaataacttagtcacttttatgttttaggaaaaaaaaagacactggctgaaaggcagagattaaattggaattgagagagtttgtagaaatgaacaacatttaggacaagtgcaagtcaagaccctaaccaaggcagtgacacgaaaaatgcagagaggtggtaaatgtacctgaaaaataatttcaggtagagtgtgtagattttgccaggtggttgtacatggatgatagtgtaaagtgcagtattggatggatctgaaatttctaatgtggttaaggaagtaagtgacttcataaaactagaactagccctgccatattcccctctctcatcacccaccagtagctcactgccaagtcctgttgatggtcgttataaaatatatagtgaatcctccttacttacttaactgccatcatgctagtccaagctgccatctcctgcctggacttctgcaatgtcctcttaattgatgtcctggcacctgctattcccccttcccatgcattctcctatgactgtgccagtcatcctatgcgtacgtccgatcatgttactctcctacttagtattctgtcatgagttcttattgctcttaagatgaagatcaaaatctttaccatggcctacaaagctttatactttgggcactgcctgccgcctcagcctcatctcaaaccactttattatgtgtacatggggctctagcagttatattcatccttctaggtgcccagatcttttcagacttgcaacatctgcacttctattacctgctggagatgctttaacctgtcctcttcatggggtcaacttctcctccccctcaggtttctgataaattatttttttcctcagagatgccatcatcccctggaccagtcttgcccattttcttccatactttaccttctctatataattatttttttagcgagttagctccatgcgaacagggattatgttctatattttaaaaattgccaagtcctcagtgcagtgtctaatacatagcagctggttgataaatttatttggggcagatgaatagtggctttaacagaactgatatgcattggtcataggggtcattaagaatatttagtgagctgtctactcactagccatcacgtatgtgtcttaacagatgacataatggcaagtcgtgttttacttggctgtttttgtgaggaccagaataatatagtgaaacatggaacattctgatgatctgatagaaaagtaaagttcagaaactctagaaaactgaagacgtgtctggtaataacatggctggtaatctttgccttttgttatttcctaccaaccactgtattaaataaccagggcttcatcattacaatcaaatgcctccttaaggaagcccagggttgtgaggctagtaagtggtagagtggatggtattcgaggccaggtcccactccaacacctgggctcagacacttgcctattgaaactagaaatcataaagtgtttttgcaaaaatgttttgtaaactgtaaaattctaagcaaagtaaggtcttgcatgcagatgactaatccagcttactctgtaagacactctaaactctatttcattgagtggtagagaggaaaatggtgcattttatataaaaggccccattgaatgaattgggttgagctgttttgtgaaggcttgattgtgattgcatggctgttatttggcaagcagagaattcctaatttcctctgctgtgagactcccaaggagacatttatattagtaaaactgaatttgcaaacctgcattttaaaatttagctttatttgtattccatgtctctctgggaggtgttcagtacattatgaaattctgtgcttttacctcctgctaaggatttgagttcttagcctaattaatcattaagtgttgtcagtctatcatgatgtggttaattatcagagagagtgtatgtgtttcagacagtcatgaccctttcctgggtaactatagaaaccttaacagtactagttattatctaaaattatagaatttggttttaaagcagtttggcctttgatagttatgggcaaataatcggttatcatctagaaagaaaggaaagcctgcatgaaacagattttttaaataatttatacataatagaagtgtgttctaaataatttataaacaacagaaatgtgttctatagaatatttctgattatatcttaaaaggctttcccccacactagttctgtttatttgttatgaagctttctcacaaacaatctctttttcccccaagaatgtttagaacgattttaatccaagactagggtaattcttaagactgccatttggtacagtgatcttatagtgcatagaagctacgtatctgagtggaaaaacagacgcatttgggggcatatacatatctgtgcagttacagagaccagtattgacaatgtgaagtatcattggtggattcttgaagccgtagctctttaaagatgggagcaaaagaagaacatgtccttttccttttttcaattctgagaagttccatctgagccagaaagaaaaaaaaaaagatatgtcattgcacctttaaatgtgaagctcggcaaggattgctgtctgaatgggggtgaccatcaatatggaaaatggaaatctgtcatattttgtacaatgctttgcatatcacatcattcagagaacaggtaaagtcccctttggagaaggcagtgcttgaagagggttttccactctcattggtagggtggatttcagtggtatgtaatgataatgatttgcttccatgttacaacatgtgaacagcttatttatagatcatgagctgcatccctctttcctctttttgtgcatgtttgctttcaaggagaatatagtgacaaaaattttaatctgccttttagctcaatgctaggttcttggtaatttgttgagcaaattaatgactttcatgtacatttacagataatataagcaaagtatcataatattggcacaaaaaaacattaaggttcaacttaattctgtttttcaaaatatattttaataaaactatacatgtaaacatctgtacttgattttaatcattttgtctttatactgcataagcttaattcataaagctagtctgtttccacaattgactgtatcacagaataaaactagctttaatgttgatgtttacttttcatatcaaaacgcaaattaaagattttggcaataaggattcagctgtcaacttatttgatgtacaagaatggcaataattgctttccattgttgagcttttactaaaaacactgaagtataatttgtttttgatagaaatattagtagctacagatattaatgatttattggtttgaaaaagatgctttttaaaaggtttctaacctgtagtaaccaagtccagtaggtatgcataatggacatacctagccagaacatcatacatgctctttgcatcttaatatatatatttttagtatgattttgctttgttgaaacaaagtgcttaaccggctgtttatttgttgttattgtggcattataaattgtgccatttcagatctcttattatgtgctaatagtttttccagcttttattatcagattctgctcttaatatttatcttgttcttttttactctacaagttttcaagctaataatgatgttagaagtttacttgatgagaaacaatgaaaattaaatctcttatttaaaacaacaaaagtcacaaattctgtgagctgagagcgtgttaggctctggaatggagagtgtaatatcactggtttccttatgccagaatgctgatcagcctaattatccaagaatcttctggttctctggcatgctacagctgtgactttctctttgtctctgaaataactgtctgccacactgcatatgcatgagagaatgttttttatatcagtaattcacttatgagtttcattccttgttaaaatgatggtgtttgcttaatttaaatattgtgtatgtgttgtatatgttatataatatataccatcacatatgtattacatatgttatatattcatgtcacatgtatgtattgtgtgtaatatagacacattacacataagtattatatatgtaatatacacattacatatattatgtaatatatagtatattcatgttatatagtatgtatgtaatcggtatgttattacatatatgtaatatatataaaatgtataaatagctatatacgtagatacatctgtgtattaagacactccttgttgtttatctgcttgagtagagtatgccatccatccatttgtaggacattaaaaaccagccatataaaaatgaaattcagtgcaagtaaagctatttcttatatttttgtaaaaatgtatattttcactatatctttttcaaataggcaatgtattatttatctcttacagttttcttactttacttggttaagtatggctgtttctaatgcagtgttttaattttttatttccatactgttggttattaatgataattggagccacacaaaatgctgttcagttcaaatttctgacaagaaagtgggttttctgacaaggagagtgggtcttccagatctattattctttatcactttcaaaagagtgcttattccttgaaaatttctgttctatctacctgttgtattttcaacaggaatttgaattcaacaggaagttatctgtgccataaactctacttttcctgctaagctgctttgtcactggaagaatttcaactgactaggcaacttgatttgtctttcaatgatttcatatctgagctcttcatgcaatggagacaatgcagtttagaacatggttgtgacgttatagaatgatcaaactgacccaaatggagggaacctggtgtaatcataatcagtgtatattagtcaggaatagttgttggtaatgcttctttttctgacttgtagacagcagtcatcttgctgtgtccttatgtggcctgttctctgtgtgggtatggaaagagagagagatctttaaagtcggttcttttcttctaaggggaccaatcttacaggatttgggccccacccatattacttcatttaaccttaattacctccctcaagggcctatctccagatatagattagggcttcaacactgaattttgaggaacagaattcagtccaaaacacagtacaaatacctacagagcactttctatagattggtgcaaaagtaattgtggtttttgccattgaaaataatggtaaaaagaacattacttttgcatcagcctaatatgtgccgaacactcatttagggacaacctactttacaaaggaggaaactgaaatcccaagaggttaaatgtctcactcaaaggcacagtagtaagggacagagttgagattcaaacctaagcagcctggcttcagggtccatatccttacctattagctattctgcctctaaaattgtggagacatatttagagcttttccttgctaaatttacttagggtatcatcttcgatgagatttcttttggctttttggaatacagtataaaaactagtttccagcgtttttttttctttgtaattcattctttacctattgtaacagttaagagagcagactctagagactgagttcctgggttcagaagtgtatttttctggaaaaaagagagaatagaatcaacgacctagttgggatgttgtgatactaaaatgaaagaacacatagaaagggcttagatgtgggctgtctgcacacttgataagcgagtgattgttaaagcaggagtagtaaataaagtgtgatctacctacctgcattagggaaggcttaccttttgctttgttgtaaatcctacatgcctactctaactagtggcaacacaggccttcttcacagagttcttatgctctggcaaacctgtcagttagatctttactaaatggatttttttttcaacttttttgtccttaaatgactttgaagatgcgagggctatatttttgttcgtttttggcttgtagattattggattcctgttaaaccagatgatccttttaagttgcatgcttaaaggacaaactatacccttctggtatacaaatagtatacagaatagtacttgcccaatgtggggacatggcatgtaagcattcatgtggtgtgttaaatgccacggatggaggaactaattttactttggggtattggaaaccaacagtaagaagagaaatcatttgtgttacgtactgaaggttgatgttgggtaccaagtttaatgttgttggaaccaaactaccaaggctaacattgcttctgggggcaattgtttctgtttaaggccacttatttacaaatgtgactttggtacctagcccatttataagttgatacgattatttttataactacttatttgttacccacctttccttgacaaagatgagattgctggtcaagttaacaatgagatttttcatcaatgatttaacatttgatttatactgttctatcagcattctttctcaaggtctactttgacaaaagccgtgtatttttacgtcttgtgttaagagttcagtctatgaccatgaaagaaattaaagctatggagcttccatgaaaatcaaactcctaactttggtctaacaattaaaaaattaactacagtaaccataaaactctaataatcaatagtagtatagagaataaattatgaaacagataaactgaaagaatatatacccaaactctaaaagtgtgattgttttactcactgaacatatgaaaagaaattatttttctaaatgcttaatcagtttttaactaatgaattttcattagtctttgatggttccttcttgtaatgctcctttcatcattgaaacttctctaacctacctgtttccctaggaattatataaatgcatctgttccccgtgtaatctggcacctctctatctctctaacatacttttcccccagcccctcctttaaactgtagatttccatcagctgaattatgtgccagcccctgctcttacctctgctcttggctgtctcaccttcgccattccaaacatgacagctcttcccctttctggactcagcttagaagtcaagtctccgtgtccatccttccttaatatgacactttaaggttggatagatactcctgccataacctaccaaacccataaaaatacttgctgttctcagaacccttatgagagttatgtgtattggtctctagtccccttatctaggccactggactgcttttcatccattattttatcccagtcacttgggcccagtgcccgacatgcaggaagcactcaagaaatagaaatgtgttgaataacttagtaagttttatttatttttacctttttcccccatattgttttaattattgaactgatagccagggtcttcactgggtaccattcaaatatcaaaatgggttgggtgtggtggctcacgcctataatctcagcactttgggaggccaaggcaggagaatcatgaggtcaggagtttgaggccagcctggccaacatggtgaaacccccatctctactaaaaatacaaaaaaatagctgggcgtaggggtgggtgcctgtaatcccagccactcaggaggctgtggcaggagaatcacttgaacccgggaggtggaggttgcagtgagccaagattgcaccagtgcacaccagcccaggtgacagagtgagactccatctcaaaaaaaaaaaaaaaaaaaagtagatgtttgaaaccaacgaatcgctattctctttattttgggcatcacataaatcatatgaggacgaggttatgcaggtgacaatagaaactggtagatggtataggataacaggcacagtttgattctatgggattttacattcaggaaattcatggtgtcttttatgtagacttaatttcctactcctggagtttctttattttgaattctgttggaatctgtaaaatgagttcctgtcaaacaaaggatggctttcttgtgcaaggtgccttgagcatgtcttctgtttgcttgcttttggtcctatgaattactgcagcccggagctccagtgacttgcatacacttcagagtccacacagtggcctgaattgactgccatctcatcggatggcaataagcttaacaatctgaaaaattcctgcactgcaggattaccaggggaggtcactggaacttcatctggctaataagttttttgtcctgtttccccttgtcagtgttcctctgagctccttaggttggatttccttttttaacttaaataaaaatcattaacactgattttctttagtgagcgaataacaaaacaccgtatctaaaacaagagtcatttcagagatggtgtatgacattaccaccaatgcaatgagaaaccgtattcatcatgatacagatgccctggggatcaaatactgtgaaaatcacaagcatttcgctctcattctcaatgtaataaagatgaaaaatatcaataaaactaaaaagcatttgccagtcgtacactctggaataatcgtgacttaaagacctgcttagttctctggacgtatgggatgtcaatgttttgtttctttagagtctagatcaacaacacgtactttttttgttgttaacatagctttttatatggctttattaaagttgaaagcagaaatcatttttattgcagcctaggagttactcagcacatctttttgaatccccttcatgtgctatttaggaagactacacaactcagagtgctgccattcctcagccttggagtaagagatcacttcacctggggcatgtttgacttgctgccccagggctaccttggcactcatccgtgaaagtacctgatattctgtttcatggtttatcctacccctcacctgttagagacccctcaacttctgtcagccttttgtgtgttagggagaaaatctgcttgctacatatcatcaggtgtgaaggtaggaatgtgaggaggaggtgtatctccagcccagttgagaaattatgttgtgaaatatatagtctcagcaccattgccactggaggtggcaattctggaaggcagtctataactcagagttttatctagtcatacttgatctcacctcttagaaaacaggatttctggagagtcgacatgatactagcaaaggtaggccttgtttcccatgaccatgtaagtgaaagagttctattttcacattttagtgtagccaattcatgttcaggtatcagaaatttagaccatcagtatatttctaataggtggaatgtaactctcctctaccactgttcaaggataaaatatactgtaaatttatcagctgtctttaaaggaaaatgactttaagctggactcttaacaccaactttttgggcagggttgaatatatggacagtagtattctattttctcgctcctgtagaccttgggtgggttgtcccattttccagttttctgtcatggcagagtgtggctattgaactggatttgtccattgatcctaccagacggagctcctgggggcctcctgatcatcatctctgcacttccgtacagtatctggtctgtattagatgtttaatccatgttttgtgaataaacttcctttcataataactcctgaatgatgtgtgtgtccagttggctagaaattatgttttgtaatggttatgctcatgagaatcccatgtgtctagctgaatatccacttgtattttactggatgtactgggacagtagaatacatatagtttaatggactctgttggaaaggcaaacacccttaacagggaaagtggctgagatacgctgatacttttcaaagaagatagccactgccttccagcctgacattctgtttcaacagaatctatggaacatattcttcctcaacagccctacactgttatctcatagggattgtctagttcctttgcaaaagacagaggcatagacctcacattgtacaaaaatgacaagctgcctgttactctgtggataattttgtcattcacgtagcagagttcttaatcagacctaaattattttgaagatattataagccacccaggtgcagatgatcttttcttatgttttatcaaatattttagttcaaataactttaacagtctttggatgtcccatcatttctgatggtaagatttctttaagatagaaaaatgtgtgaactcacagcaaggaatccagaatcgtagctccagatcttctactaattattacatggtccagcacaaatcacttaaaggtactgggcactggatttgtcaccttaaaatattgaggtgagatgattgcaaattaggaaggaaaagacaagatatgtaaattatgatgcaagttagaataatagcaaaataattatggatatatttttcaaatatgaagatcatagtatatttgacagcattttgcatagtatttttatacaacattatgtatattatattgtataatgtgatgtagagcatttcctctactgctgtatctcatgaattaaaatatagatttttagaactttagacgaatttgtcatacattcacttacatttttatcacttgttcctgttaggcagttgtcatgttctattattaaatggaatataattttattactattgctattattattttatagtcagggcctctctctgtcatccaggctggagtgaagtggtgcaatcatagctcactgcagcctctaagtcctgggctcaagcagtcttcttgcctcagcctccagagtagctgggaccataggtgtgcaccaccatgactggctaatttttatgtttttaatttttcatagagatggggtctcatttggtctcgaaatcctggtttcaggtgattctctctccttagcctcccaaagctctgggttaacaggcatgagccaccacaccgagtctggaatatgttttttgagtaggtgaaatgatttttattttgtgacaaagtattaatgtttgaaatcagcttttaagatactgtaacaattatgtcaaccacaatgtagcaaaaattggaagatgttttatatttatttaaaatccatcagaagtagtaaaatccttaaaactcacatacataaaacaactgtataatttaggaaagtgatgtcatgaaggtttgattttaattctgcaatgaagcaagaactactgggaaagccatcagcctgaattctgcaatttttttaagatgaaaattaaatgtttaaactttagataaaatacctttctaaatctagtctatttgttctcggaaatttttagtctgttacattattcttgtcaatattagttttagtgctccatatcattacacatgttatttcattaaccttgtctacataccaagaacctgtgacctcctcaagtcctttacataaattctctaacttggtgaaggtgaatttttagttttcttcttttttttttttttttaagacagagtcttgctctgtcacccaggctggagtgcagtggcgcgatctcggctcactgcaagctccacctcccgggttcacgccattctcctgcctcagcctcctgagtagctgggactacaggtgcctgccaccgcacctggctaattttttgtatttttagtagagacagggtttcaccgtgttagccaggatggtctcgatctcctgatctcgtgatccacctgccttggcctcccagagtgctgggattacaggcataagccaccatgcccagcctctgatgtttttataaaatagttcatggaacaatttagacctcttgagttgcatttttctaccagctctttatctctggttgtttgttttgcagttaaaaacaagatagtcagggtcctgtttgaaaacttgctttctagtcttgagtacctggaattctgcctaactgtttcatgaagaggggttttttatagtctcttcaattgaagttagttaactcacagctctgtttttgataaaccagcaaaatctttgaatcattaaataacttcaagcgttgggaattatttcatttgcagttgaagttcagggaagagattaagacgtggtgtgttataagaagtgttctgggtgctgatgtttacattctggtaccagtgactgactgaatgaattttataatgtggagttgacaccacctgttcccaaaagcaccatctaagagtctgccaatttagtagacccgtatggatgaggcatcctctgaaatagccaattactataacagagaatgagtttttcctaaaatcctggcctctaggttgttgtttttattttttacttcgtatttcgtctttgtcagcatcctgtagagtctagaaaatgaaaacactgtccgcttattatttgagtttatagtataaaagaaaatgggctgggtgtggtggctcacgcctgtaataccagccctttgggaggctgaggcaggcagatcacctgaagtcaggacttcgagaccagccgggccaacatggtgaaaccctgtctctactaataatacaaaaattagctggacacagtggtgcatgcctgtaattccagctactcgggaggctgaggcaggagaatcacttgaacccgggaagcagaggttgctgtgagccaagatgacgccaccgccctccagccaaggtagcagatctagactctgtctcaaaaaaataaaaaaaggataaaaaaaaaatgcctcttcatgttagaatcagagcaagcccaaaggctttcctttagtcatttggtggttgtgacattgtggacactggggtactgcaacaatcaaacttttaagttgacccttgaccacagtgaaaatcatagcaattacttttgatctacatttaggtctcattctccatagaattgtttcataatatcactttatgtagtattgtttcctattgatatcttcttagccatattatatcattcccctcatagttataaaatgagttgctattcatgataataatcctggtgcagtagtaaggaaacattggtggtttacagaatgaatttctaacatagttctcattgttttactctacttcccaaaataaaagtttcaaagaatcagaagattttaggtattggatgaatctcagaaaccattttggagaatgaggcttactttgctgttgaagaaaggactctttttcagtggcttacctgaacttagtgagttcttgacagtaataactattgattccagttttctgattacttttaattaaattgttctttttgaattgcctcacccttttaaaataaggattgtgcccataatcagattttgcaagggccagagccattatttcattaaccttgtctacatacctattattacatcccgattattgtagtagtagaaactggaattgcctagttatgatctcaacttgattttcactatttctatttgcctatgtatttattaatccacatcgcttatgcactttagaacagagagtgaggagctttgtatgtggatgtgtttaaaagttcctaatgttgataatcgttggtggtaccttatactgtctaaaatttatttttatcacatttactaaaatgcatacagggatatggcttcagaaagaatgctagactcttttacatttaacaaaaagttctctggagctcatgcccttgggaaacttgataatgaaagtcagaagagtgttacaaatctaatttagaaagattttaccaatttggtaaatagaaaaattctgaatagtgaatctggtagcaaatatacatttattagacttttgattggttatggatatgtgctgaactttatgggtaaaagcacaaatatcagaacatattgtatttcacctatcatattttttcttaaagtgcttaaaatattatccctttgaacctgcttcactgtttttgcttgttaaagaatatagcaataatggctttaaacttgaaatcttaaaataaatcactgggaccagaacttttgtatttcttctcaagttttatattgaccaaagaacaataatatgtatgctttattttcatagtgctgtataataaagaaaaccagacaaattcctgagtttccctttcaagtaagaccatttttttttaatagctagagaaactgaagaagaaaacatttggaatttaggacttcccagcattctatctccaccactgtccattcttcagatttcaacactaccaccaacacccccacaccaaatacatgtacttcaaatattgtacctaaaataaaaactcagtcctatgatgaagtcctgggctttcttaagtagtcaattagaaaggtcagtggtttctaatgcagagagtttatgacctggtgtgtttcagctaatttcgattctttcagatgtcttctgcgcaaattgcttgattacctcctacatctctcttaatctgggttactgaacataataataaggctttacctatttttttttttttatagacccgttcatcacctgaatcttttagcacttcaccaacagctggtaacaagcagaatcactgacattcttttagatttctttaggctgctttttaatcctccctgattgtcatgagcaggaataaggaagggagaaggaagaccaattttttgtttaatccaaggtgatcaaaagaagtccccagtaatagtacagactgactttgacagtgatttgtatttgcaaaatatatgaggcttgctgtattccactttttctcttttttttcctctttgacaaaaacaaagttttcgtttcatccagaatatttcatttatattttagaggactatttcccagtccctttatcatgggaatggcttgtctattctctgctacttcatttgacttttaaagagtctcagcctttcttgaaaattaacagattatttaattagttatacatgttttgttttgttttgtttttcagtcgtaatataaatatatatgcttgtaggattgtaaatctggaaggtagccctttaagtgagggtattcccagtcgaatctgttatctttttaatattctcacttatcattgaccttttttatttttatttttttggtgagaaagcgtctcacactgtcacccaggctggagtgcaatggcgtgacctcggatcactgcaacttctgcctcccaggttcaagtgattctcctgcctcagcctctggagtagctgggattacaggtgcccaccaccaagcctggccaattttttgtatttttagttgagatggggtttcactgtgttggccaggctggtcttgaactcctgacttcatgatccacccacttcggcctcccaaagtgctgggattacaggtgtgagccaccacgcccggccatcattgacctttttcagtataaatgccctcttatttcctttttatcattacacatgtcaaaataaatttctgagactgcagtttttactatcactgaatagtctcatagagaggcatgtttgcaagtagtattacaaatcataactttttttctggcactttattatagggccttggagattaccttggatttgtgtaatctcaatatggatgtgttcaaagctaaaggaatttatttgatgcgaggggagattgaaataggctttactacagttacaggtagttagtagacttggataaaagaaatgagggtactttggggtttcataaatgttggtaatgttcaaagcaacattgctttacttttctgaaggtcagaacattcctatacaaaatttaagtcagttttgatagagatttagagagacttaaatctctataaatttcatgtaatgaaaatacgttgttacctcaaggaaaaatgaattatattattacaagattgtttttaagtttgatatttataatacattaatgaaagtaacgtgaacccttgatgtcatgatgcactagcgtatggtgctccattgttttgactgtgtctgcatgagtgggctggtagtggtttatcaaatggctttcagggccaggatgaggtggagtggaactggcttgtagtatttgctgattaccgtggtggaaacactttgacgtggacaattccagcctaccaatgtggtgcaccccagggcactattatatggtcttcccagtgtataattgtagatataaatgaccttgagcacagataacagtaacatgtagtcaaataatcaggtagtgatgagttctgagtctttattacatttgttttttaacaatttaattgtaatataaaatgtttaataatgaatatggtttaatgactggctcacaaaatacatgaaagtttaagtttcctctcctgagttggtacaagccagcttcagcacaccgctgaaaatatattgcgacactgagttctattatacatgtggtttctttccttgattatggcccttgcctttgaaaatgctgctgtttcctctctctagataatttattattcttatcatcattaatataaattctaataagctgtttatgtttgagaatattcttgtttctgcataaagttagttaaagattggtgtcattgtccctcagaaccttagaactcagtatagatagagaaagtagatagaaatattcaaaatgtaaacattaaacaatgatcgggttaaatgcttatattttgtcttgctggttaggaattgaaaagtttaagctagagcttaagcttaggttaggaaaataggttctcttccattctgattagtccagtaatacttctggtggattaaagtaagattttgttaagccctgtcccctttctccctcaatttttgggcaaacagattgatagtgattgagtcattttgatagtgattggagacattccttcaccactgcaaacaggaagggtctgtgagtcattttgttatatatggagttgcttccaaaagcaagagacactaccatggtttgccaagggtggacttctgagatgactggtcacgtttgaggatttggggcttatttggaacaatcaaaggaagcaggagttgcctttatactgaggagaaatgttcaacagaagggtcaaggctgacagtaagatatcagtctggccacttgtcaccatagtttatgaatttatttctgttacagagtacttggtatcagctggaactttctccaaagatggacattctaaagaaatttccaaactttcatcaggttagatcattggagaacttattaactgagcctgccaagcaacacatttctgaactccattttaatatttaagctcgtattgagacaattataggcaccagttgaataaagaaagaaaacatttcctactttacatttgatattttcttctattataatcaatgtgaaaatcatttttagtttactaacaggaagtaatttctttcccttaaaattcccttattttaaaagaaagattgtgtataacatatgaatcctgtcatttttgtcttgttggtcaggaatcgaaaataaaatttaacaggttttaacaagtgtgattgagatttgtttcctaatcactctacatgttttttctcttttgcatatatgtcattatttataagcaacttcaaatagaacagaaggtagggcataaattatcaacaactttagtccaaaaagatgttaatgaaaaaagtaacaatatttgtgatataatatatgccgtgctggtgagtattgttggttgtcttataatcccaattgctgtgtgtagttactgttccctctcctttcctctaccagggtggtcttgcaatatgatcaaatggttatgttcagaagtacagttagcctggtatttcacagggagcaatatgacactgcataagcagggaaaatatcatagatgggaagatatattatctggcaaaagagtgatagtccttcttgggaaaagaacattgatctcacttggaaaatgccacagtcagaaagctcgcagtcctccaatacatggaccagagaaagaaatttcttcatcccctgggccaagaggcaaagaagttgtttcaaagcctaacaagctcagtggccactttgtccttctgaacatctcaacgtagaccatgaatgtgaaactagggtgcccagcacaaagtgagctgttgtgattcttcattctcattgccaaaattcagacatgcagaatgagcatcaccagagaaggagcaccctaacaaaattaagattcattgcattacatgtcacacaagttcttgtgaagcctagaggttcattagcttttctactgtccagtttctggatgactttttgtggtcagcatacttacgtcgttggttttcagtttctgctcttgtgtattcgaatccaggtactatgttttgagtaaccatatgcctctggctatgctaaatttagacctatttgcatttttctttgactgtacattaaactattcattagattaagaagtttattcatgcctgtaatcttagcactttgggaggtggaagtgggtggatcatttcaggtctggagttcgagaccagcctggccaatatggtgaaacctcgcctctactaaaaatacaaaaattagctgggcatggtggtgggtgcctgtagtcccagctactcgggaggctgaggcaggagaatcgcttgaaccgaggaggtggaggttatagtgagcagagatcatgccactgcactccagcctgagagacagagcgagactctgtctcaaaaaaaaaaaaaaaaaaaaagtttatgctatagaattgtaagctttcatagaaaaataaatggattagtatatcattaataattaacaacttagaattataacatatgaaataactttttcaattaaaatttggttatgggactcgaggtataacattttattgtattttatgtttaaatggattacaaaagtacatgctcacactttactgatgaacaagtttattacctcaaagaaaatgtaatcagttcaaaaacattttgtatcatgaggagctaaacatgtcttattttctttggttgtattgttattgtattatgctgttctcataaaggaaaattattaaagtgcatattgcaccaggaaactagacctgtacataacactgacttactagaaaattgcattaaaaattgtttgggcaatgatattaaaaattattataaacagataccactattttactgttcttcaaagcttccttcatttgtaaaatacatatattttatataaacatattgaacatcatacatttctgaatttaaattaaaattttttaaatgacgtttattgccaaattagtgcttctacaacagaagactttttttggaagaatgtcattgaaccaatgagataggagaaattctctctataatttgaaaccccattactttagttgacttaaaacgcaatttgaaatcacattactttaggtgagttaaaatgctaaggatgccatttttaaatttatataattatcttgggatatatagtcacatgaaaggatactgatactgactatattgggagcaagattgtggaatagaatccttcagcaattgtcctccctgtaggaacaacagatagaacaactatccactcaagaaagtaccttcataagaatcaaaaatcaggcgagcaatcccactatttggttttaatatcacagaaaaggaagaggcactggagagggtaggaaggacagtcttgaattgcccacaccactactccctcatcccccagcagccgctgcttggcaccaggagagaatctgtatgcttgagggagagagaacgcggttcctttgggacttggcgttggaactcagtgctgcctgtcacagcagaaagcaacaaggggcagaattcaggtggcactcatggagggagcatttagaccagccctggctggtggagaatggtccatcccctgagcttctgccagcccccccacagcaggctaaagcactccggggttctaaataaacttgaaaggcagtctaggccacaaggactgcaattcctggggaagtcccagtgatgtgctgggttcagagtcagtggaattggaggcgcaggccacctacggaggcaccagaggaacagcgaagggagcgcttgccatcactcctgcccttagccccaggcagcacaactcacagctctaggggagaatccatcctgcttgaggaggttgggggagagtaaagaggactttctattacaacttggataccagctcagccacagtatgatagggcactgggcagtcttgaggcctccattcccggccctagttcccaggtgacatttctaaacacaccttgggccagaagggaacccgatgccttgaagggaaggatccagtcctggcaagatgcatcattaaggagccgttggtccttgaataaatgtcagctgtagccagttagtacttgccatgggccttggttgagactcagaggcatgctagcttcaggtgtagcccagcgcattcccgcctttcttggccacagggaaagactccttatgcttgaggaaaggagaaggaagagtaaaggggacttttcctttactcaccagctcagccacagcgaagtggagcagcaaatggggaccctgagtccaggctttggctcctggacattatttttggacctgctatgggccagacgggagcccactaccctgaagggagagacccagacctggaagcattcaccacaagctgcctgaaaagcccatgggcctcgagggaacatctgcagtagccaggcagtacttgccctgggcctgggtcgctggtggctgcagggaaactccctctgcatgaagaaaggacagggaagagtggggaggactttgtcatgtggcttgaatgccagcacagctgcagtagaatagagcaccaggtagattcctaaggtttctgactccaggtgctggcttctggacagcattcctggaggtaccctggatcaaggaagacctcattaccctgacggggacacaagcctctctgggtttcccatctgctcactgaagagcccttgggccgtgagtgaacattcacagccagacagtggtcactgtgggtctttggagagacccagtgctatgctggcttcaggtgtgacacaatgcagactcagtggtggtggccacaggtgtgctcatgttatccctctccagctccaggcagctcagcacagagaaagactgactctttttgggggcaaagtgagggaagagaacaagagtctctgcctggtaatccagggacttctcccagatcttatccaagaccaccaagatggtacctgtacaagtctgcaaaagccatagtattattggactgagggttccccaaatgcagatatggctgcagtgactaaagatttatatcacagcatcagttcccttggaatacttggtaagccttcctaagaagggtgggtacaaacaagccaagactgtgaaggctacaataaatacctaactctacaatgccctgacactgatgaacatccacaagcatcaaggccatctacaaaaacgtgatctcaccaaacaaataaagtaccagtgactaatcctggagtgacagagatgtgtaatttttcagacacagaattcaaaatagctgttccgaggaagatcagtgaaattgaggatagcacagagaaggaattcagaatcctatcagataaatttcactaagagattgaaataattataaaaactgaagcagaaattctagaggtggaaaatgcagttggcatactgaagcatgcattggagtctctcaaaagcaaaactgattaagcagaagatagaattagtaggcttaaagacaggatatttaaaaatacaaagttggaagagacaaagaaaaaaatcaaagcacacctataagatctagaaagtcgcctcaaaagggcaaatttaagttagtggcctcaaaaagtcagtagagagagagagagacagagatctaggtaaaaagtttattcaaatggataataacagaactttcctaaactagaaaaatatatcagggtttaagtacaagagtgttatataacaccaagcagatttagtccaaaaacgacctcaaggcatttaataatcaaactcccaaaggtcaagaatagagccctttgtcagacagatagattgcaaaagttttctcccattctgtaggttgcctgttcactctgatgatagtttcttttgctgtgcagaagctctttagtttaattagatcccatttgtcaattttggcttttgttgccattgcttttggtgttttagtcatgaagtctttgcccatgcctatgtcctgaatggtattacctaggatttcttctaggatttttatggttttaggtcttacatttaagtctttaatccatcttgagttaatttttgtataaggtataaggaaggggtccagtttcagttttcctcgtatggctagccagttttcccaacagtatttattaaatagggaatcctttccccatttcttgtttttatcaggtttgtcaaagatcagatggttgtagatgtgtggggtcacttctgaggcctctgttctgtttcattggtctacatatctgttttggtaccagtaccatgctgtttgtttttgttactgtagccttgtattatagtttaagtcaggtagagtgatacctccagctttgctctttttgcttaggattgtcttggctatatgggctcttttttggttccatatgaaatttaaattagtttttcctattctgtgaagaaagtcagtcgtagcttgatggggacagcattgaatctataaattactttgggcagtatggccattttcacagtattggttcttcctattcatgagcatggaatgtttttccatttacttgtgtcctctcttatttccttgagcagtgatttgtagttttccttgaagaggtccttcacatcccttgtaagttgtatacctaggtattttattctctttttagcaattgtgaatgggagttcactcatgatttggctttctattattggtgtataggaatgcttgattcttgcacattgatttttgtatcctgatactttgctgaaggtgcttatcaacttgaggagatttggggctgagacaatggggttttctaaatatacaatcatgtcatctggaaacagagacaatttgacttcctctcttcctatttgaataccctttatttctttctcttgcctgaatgctgcggccagaacttccaatactatgttgaataggagtggtgagagagggcatccttgtcttgtgctggttttcaaagggaatgcttccagccttttcccatttagtatgatattggctgtgggtttgtcataaatagctcttattattttgagatacattccatcagtacatagttaattgaaagtttttagcatgaagcagtgttgaattttatcaaaggccttttttgcatctattgagataatcatgtggttttgtcattggttttgtttatgtgatggattatgtttattgatttgcatatgttgaacaagcgttgcatcccagggatgaagccaacttgattgtagtggataagatttttgatgtactgctggattcgttttgcctgtattttataatctacgaggaacttaaacagatttacaagaagaaaacaaccgcatcaaaaagtgggcaaaggatatgaacaggcacttctcaatagaagacatttatgtggccaataaacatatgaacaaaagctcatcatcaatggtcattacagaaatgcgaatcaaaaccacaatgagataccatgtcatgccagattgaatgacgatcattaaaaagtcaggaaacaacagatgctggagaggatgtggagaaataggaacgcttttacactgttggtgggagtctaaattagctcaaccattgtggaagacagtgtggcgattcctcaaggatctagaaccagaaataccatttgacccagcaatctcattactgggtatatacccaaaggattataaatcattctactctaaagatacatgcacatgtatgtctattgcaacactattcacaatagcaaagacttggaactaacccaaatgcccatcaatgatagactggataaagaaaatgtggcacatatacaccatagactactatgcagctgtaaaaaaggatgagttcatgtcctttgcagggacatggatgaagctggaaaccatcattctcagcattctaacacaggaacagaaaaccaaacaccgcatattctcactcataagtggcagttgaacaatgagaacatatggacacagggaggggaatatcacaccagggcctgttgtggggtgagagcataggggagggatagcattaggagaaatacctaatgtagatgatgggttgatgggtgcagcaaaccaccatggcacgtttttacctatgtaacaaacctgcacgttctgcacatgcatcccagaaactaaagtataataataataataataataaagaatagagaaatgttctgaaggaagtgaaagaaatgaaagaaaatgcagttgtgctccagtacatctggcagcagacttttcagtggaaacttgacaggccaggagagagggacataatgtatttaaagtgctgaaggaaaaaaaaaaaaaaaaaaaatatatatatatatatataatcctagatagtatatccagcaaaagtatccttcaaacatgaaggagaaataaaatccaagggatttcatcaacaccagaccggttctataagaagtgctgaagagagtttttcaatatgaaattaaaagacattaataaacaataggaaatcatctgaagatacaaacctcactggtaatcgtaagtataaagacaaacacaaagtattatgacattgtaattatgatgcatgaactcatatcttgagtagaaagtctaaaagatgaacctattaaaataactacaacaacttttcaagaaatagacagtatgtaatatatgtatagaaacagccaagagttaaaaagcaggggacatggagttaaaaagcatgggacacgaagttaaagcctacagtttttattagtttcttctttgcttgttagtctgtttatgcaaccagtgttgtcgtcagtttaaaataatgggctgtaagatactattttcaagcctcatggtaacctcaaatcaaaaaacctacaacagatacacaaaaagaggcatgaaattaaaatatacttccagagaaaaccacattcactaaaacgaagacaggaaggaaagaaggaaggaggagaccacaaaaccaccagaaaacaaataacaaaatggcaggctgtaagtccttacttaccaataataacattgaatgtaaatagactaaactctgcaatcaaaagacagatttgctaggtgggttgaaaagcaggagttgtggccagcgagatagctaatgcctgtaatccctgtactttgggaggtgggcagatcacttcagccaggagtttgagactagtctgggcaacatggcaaaaccctgtctaccagaaaaaacaacaacaacaaaaaaataaattagccaggtgtgttggcatgtgcctgtagtaccagctactcaggaggctgaggttaggaggatggctgaagcccatgaggtggaggttgcagtgagccaaaatcacaccattatactccagcctaggcgacagagtaagaccctgtctcaaaaaaacaactcttgcctacaagaaacacagtttacctataaagatacacatagactgaaaataggggatagaaagagatattccatgcaaattgaaagcaaaaaagaacaggaatagctatatttttataagacaaactagatttcaagacaaaaactataaaaagatacaaagtcattatataatgataaagggatcaattcagcaagaggatatcacagttgtaaatatacatgcacccaacagtggagcacccggatatataaagcaaatattactgtagtgaaagatagagaccccaatatgttaatagctggagacttcactctgcttctagcattggacagatcatccagagtatcaacaaagaaacactgggcttaatctgcactatagaacaaatgtacttaatagatatttacagaacatttcatccagtggctgtagaatacactttttcctcagcatatggatcattctcaaggatagaccgtatgttaggtcacaaaacacgtcttaaaactttcaaaaacaatgaaataatatcaagcatgttctctgacaacaatggaataaaactagaaatcaataataagaggaactgtagaaactatacaaacacatggaaattaaacaatatgctcctaaatggctattgagtcaatgaataaggaaattaaaaaattccttgaaacaaaatgtaaacagaacataccaaaacttatgggacacagagaaagcagtattaagagaaaagtctacagccatcttcaaataaacaacttaataatgcatgtgaaaaagtagaaaagcaaaaatgaaagcataaattagatgaaaagaaataataaagatgagagctgaagtaaataaaatggaaacaaaaaaattacaaaagaccaaggtaacaaaaagttggttttttgaaaagataaaattgacaaatcttttgcctaaaagagaagacctaaacaaataaagtcagagatgaaaaaagagacattacaactgatactgcagaaattcaaaggatcattagtgactactatgagcaactctataccagtaaattggaaaactagaagaaatggataaattcctagacacatagaacctacaaagattgaaccatgaagaaatccagaacttgaacagaccaataacaactaatgaaattgaagccctaataaaacaaaatctcttagcaaagaaaagcctgggacctggtggcttctgtactgaatttcaccaaacatttaaggaagaataccagccctacccaaactattctaaaaaataaaggaggagggaatacttccaaactcattatttgaggccaatattgccctgataccaaaagcagacaaatacaaatcaaaaaagaaagctacaggccaatatccctgatgaacattgatgaaaaagtcctcaaaaatcccagcaaactgaattgaacagcacattaaaagatcattcattatgaccaagtgggatttataccaatgatgcaaggcaagggtggttcaccacatacaaaccaatcaaagtgatacattatactaggagaatgaaggacaagccatgtggtcatttcaattgatgctgaaaaagcatttaataaaattcaacatcccttcatgataaaaacactaaaaataactgagtgtagaaggaacatacctcaacacaataaaagccacatatggcagacccacagctactatcatattatgaaacattgatgtgagaaattgaagaggacacaaaaaatgaaagctactccatgttcatggattggaagaatcaatattgctaaaatgtacgttctgcccaaagcaaaccgcagatgcaatacaacccctgtgaaagtgctcatgacattcttcaaaaaaatagggaaaaaaaaaatcctaaaattcatgtggaaccacaaacgacccagaatagtcaaagacatctggaacaaaaagaacaaaactggaggaatcatactacctgacttcaaattattctacagagctgtggtaaccaaaaaagcatggtactggcataaaaacagacacatagaccaatggaacagaatagggaacctagaaagaaatccacaaatctacagtgaactaacttttgacaaaggtaccaagaacatacattggggaaaagatagtcttcaataaatagtgctgagaaaactggatatttatatgtagaagaatgaaactagacccctctctcttgccatatattaaaatcaaatcaaaatggattaaagacttaaatgtaagacctgaagctatgaaactatttgagactaaaagaaaacattgaggaagctcttcagaacgttgttctgggcaaagatttattgagtaatacttcacaagcacaggcaaccaaagcaaaaatagacaaatggattacatcaagtttaaaagctgcacaacaatggaaatactcaacaaagtgaagagagaacccacaaaatggtagaaaatatttgcaaactatttgtcagacaggattaagaaccagaatgtataaggagctcaaacaattttatgggaataaaatctaataatctgattttttaaatgggcaaaagatttgaatagtcatttctaaaaagacatacaaatggtaaacagctatgtaaaaatgtgctcaacatcattgcattagcctattttcatactgctatgaagaaatacccaagactgggtaatttataaagaaaaagaggttcaatgaactcacagttctatatgtctggggaggcttcacaattattgcagaaggcgaaggaggagcaaaggcatgtcttacatggtggcaggcaagagtgtgtgtgcaggggaactgccctttataaaaccatcagatcttgtgagacttattcgctctcatgagaacagcatgggaaaaacccacccccgtgattcaattacctctaccagatccctcctgtgacatgtggggattatgggagctacaattcaagatgagatttgcatggggacatatcaattattgatcattggtgagatgcaaattgacattacaatgagatgtttcacctcagtaaaaatggcttttcttcaaaggacaggcaataacaaatgctgttgaggatgtggagaaaggggaacgtttatacactgttggtcggaatgtaaattagtacaaccactacggagaacactaggaggttcctcaaaagaaacaaaaatagaactaccatatgatgtagcagtctcactactgggtatttatccaaagaaaatgaaatcagaatgttgaagaaatgtctgcactctcatgtttattgcagcagtattaacaatagccaagattcggaagctacccaaggattcatcaacggatggataaagaaaatgtagtgcatatacacagtgcattattcagccataaaaaagaacgaaagcctatcatttgcaacatggatagaactggaggacattgtgttaagtgaaataagccaggcatacaaagttaaacttcacatcttctctctcattcatgagagctaaaaattaaaacaatttaacttatggagattgagagtacaatgatggctaccagtggttgggaagggttgtgggggttgggggtagtggggatagaatgagtaagatctagtatttgagatcacaacacgataactacagtcaaccataatttattgtacacttaaaaataactaaaagagtataactggcatgtctgtaacacaaagaaatgataattgcttcaggtgatgcataccccatttactctaatgtgattattacacattgtatgcctgtatcaaagtagctcatgtaccctataaatatatatatctactatatattcataaaaatttaaaaattaaagatagagattatattcgatatttctacaagaaatttgtaagttttaattcataaaaattcttgtgttgcatttctattctttttttactagttttatttttaagtttcatcttcattttagtacctaagagtgaaatcacttatttgtacacatttttcagagttgtgtgtcccttgcatatatctatttgtacttctcatttgttttgttttgtttttaacttttcttttagattcaggagtacacatacaggtttattacataggtgaagttgtgtgaagggagtttgttgtacagattattttatcacctgtgtactaaacctagtacccaatagctgtttttttctgatcctctccctcctcccacctgcctctgtcaagtaggccctagtgtctcctctttgtgtccatgtgagctcatcatttagctcccaattataagcaagaacatgcagtatttggttttctgttcctgcttaagtttgctaaggatgatggcctctagctccatccacattcccacaaaggacatgatcttgttctttttgatggctgaatagtattccatgatatacatgtaccacattttctgtatccagtctgtgatgataggcatttaggttgattccatttctttgctattgtgaatagtgttgcaaagaacacatacatgaatgtgtctttatggtagaatgatttatattcctatgagtatatacccagtaatgggattgctgggttcaatggcagttgtgtttttagatttttgaggaatcaccacactgcttttcattttctccacaacctcaccagcacctattatttttgactttttattgccattctgactggtgtgagatggtaccccattgtggttttgatttgcatttctctaatgatgagtgatgatgagctttttttcatgtgtgtgttggcctcatgtgtgttttcttttgaacagtgcttatttcctttgcccacttttaatgggtttgtctgtttttttttcttgtaaatttgtttaagttcctcatagatactggatattagacctttgtcatgtgcatagtttgaaaaaattttctcccattctgcaggttgtctgtttactctgttgaaagtttcttttgctgttagaagcacttaagtttaattacatcccatgtgtcaatttttgcttttgttacaattgcttttggcatctttgtcatgaaacctttgccagtttctatgttcagaatgatattacctaggttgtcttccagggtttttatagcttttggttttacttttaagtctttaatccatcttgagttgatttttgtatatgatataaggaaatggtccagcttgaatcttctgcatagagttagccagttatctcagcaccgtttattgaacattgtcaaagaacaggtggtcatagatgtgtggccttatttctggggtctctgttctgttccattggtctatgtgcctgtttttgtaccagtaccatgctgttttggttattgtagccccatagtatagtttgaagtcaggtaatgtgatgcctccagctttgttctttttgcttagaattgccttggctatttggccccttttttagttccatttgagttttaaaattgttgttttctagttctgtgaagaatgtcattggtagtttgataggaatagcattgaatctgtaagttgctttgggcactatggccattttaatgatattgattctttctatccatgagcatggaatatttttccatttgtgtcatctctgatttctttgagcagtgtttcataagtcttattgtagagatctttcacctccctggttagctgtatttctaggtattgtattcttttggtggcaattgtgaatgcaattgctttactgatttggctcgtggcttggcagttgtgaatgtataggaatgctagtgattttttaacattgatttttttttttaatcctgaaattttggtgaatttgtttatcagctgaaggagcttttgggctgagactgtagagttttctagctacagaatcatgtcttctgcaaacagagatagtttgacttcctctcttcctatttaggtatgcgttatttctttctcttgcctgatagctgtggccagaacttcccatactatgttgaataggcatgataagatagggcattcttgtcttgtgcctcttttcaaggggaatgtttccagtttttccccattcagtatgatgttggctgtgggtttgtcatacatggctcttaccattttgaggtatgtccctacaatacctagtttattgatagttttttaacatgttttttaacatggaaggatgttgaattttatcaaaagccttttctgcatctattgtgcatcattgtgcatctattgtgataatcatgtagttttctgcatctattttctgcatctgtaatcatgtagtttttgtctttagttctgatgaattacatttattgatttgtgtatgttgaaccaaccttgcatatcagagataaggcctacttgatcttggtggattagctttttgatgtgttgctgggttcagtttgccagcattttgctgaggatttttacatcaatgcttatcaaggatattggcctgaagtgttttttttgttgttgtgtctctgtcaggttttgatatcaggatgatgctggcctcataaatttgatggggaggagtccctcctcttcaattttttggaatagtttcggtaggaatggtaccagctctttgtccatctggtagaatttgctgtgaatccatctggtcctgggcttttttgttgttgttgttggtaggatatttattactggttcatttcagagctcattattggtctgtccagggaatcaatttcttctttgttcagtcttggaagagtgtgtgtgtccaggaatttatccatctcttctaggttttctagttcatgtgcatggagttgtttctggtggtctctgatagctgtttttatttttgtggggtcagtggtaacataccctttgttgttcctgatagtgtttatttgtgtcctatttcttctttattaatctagctagtggcctatcttattaattttttcatggagttctacctgtgtctctcaatgtttcttggagttaaattggaacttttgtatctgttgccgtaatagaaggtcttgaagtacttagtataaactgcccattttatttcttatgtatatactttatcaaactctactggtttgtgtatactacatgatgtttgaaatgtttatttcatctcccatggtacctggcacagagtttggggcaagtgaaagacatagaagttgacatgacttgtagatttctgagtatatctggatccattagggctgtggaatttgatgctgggtgagatggattcttagcagctttctaggttcctgatgaggaagcattggagtgactactgaaatggaagaatggggtgggacaacatcagattctggactctggaatgtaattgtctgcataagactttagcagctaaagcagctctctttatccaccaatttcaaaatatgcagttgttaactcctatatcctctttctcttactgtcaatctctaaagctttagcaggttggggaaatttttctccggcctcagtctgctatcatctacattaaaaaacaaaaaacaaaaaactaatgtttgcataaaccttttctccttcatactattttgatcacggtccttattggcttttttagaaacatttggcctggcaatgtttgttttatttaagtactttttttaacatatgtatatacccataaaagttcaccggaattaaagtaatgatcatgtccatttttctgaatgtttctgtgagatttttaataatttttctcccatgcacccttccaatccattctaaacttttttctatcactgtatattagtttgcacatcctacatttttacatatacatagcatgcattcttttatatctggcttacttcactcactaaaattattttgagatttaatgatattgcagtgagcataaagttttttgtatgtttctaatccatatttattgtatggatataccacggtttgattgtccatatgttagcaacggtgaatccacatgggtctgcagcagcttgattcttgcctccccagaggaaagaattcatcacaggggcataaggcagagtgacagagtgaggcaggttttagaatgggagtgaaagtttattaaaaagttttagaggaggaatgaaaggaagtacacttggtagacggccaagtgggctacttgagagatccaagtgcaccatttattctttgtcttggagtttttatacattggcatagttctggggtctgcatttcttctcccctgattcttcccttggagcgggctgtctgcatgctcagtggcctgccagcacttgggaggggccgcatgctcactgtgttgaccgaagttgtatacatgatcatttgagtgtttttgccttaccagttgaatgttcctaaaagaaggtcatataccagttaaacttagcctcctagtgcacgtgctacagcccacttgcccaactcctgaaatcctactaggaagctgctgatatcagcttcaggtgttttctatctgctgggagactgcctttccctggcagtggctcttaccaattattattctagggagacacttaaacaactacctgaccatcccgtgatggtcacctagcatttctaggggtagggggtctcctgccatgctcatgtttgcttaactacttattctaacacattcacctattgatagacatttgggctttctccagtttttgattattacataattaaggctgccataattatttgtgtataaatcttttttatgaacctatacttttatttctctttgtaaatatctagagaggaatggctggatcatatgatcagtgtatatttaaactaagaaattgtttccaaaagtggttgtacaatttttacactcacaccaatattggagttccagttactatacttcctcaccaaggtttagtatagttaatctttttaattttagtcattttaatagttgtgggttatgatttgcatttccctaataataacgttgagcctctttttatgtacttctttgccatttgtatattttctttggtaaagagtttgtttaaaattttgcatatttattttattggattaattgctttattactgagttttcatagttctttatacactttgagtacaggcctttatttgatatatgatttgatagtactttcttcaggctgtggattatcttcttattttcttaaaaatgttacacaaatagtggaagcttttattttcatgatgttcaatttattcttcatggaccatgcttttagtgtcatgtctaagaaacttttgcctaatctcagtttgcaaaggttttctactaaattttcttttagaagttttatcattttaagttttcaaattaggtcaatgatctattaattaatttttctataaagagtgagacatgagttcaagtttattttttttacatggatattcagctgcttgagaaccattttcaaaagagactattctttctacgctgtattgccatttgcaccttgcttgaaaattctgatgtccatatacttttggatatttcttggctcatgactatcttgattactatctctttataatattgtaagttttgaaatgaagtcatattggccctttaactttgtttcttttttcataattgtcttggctattctaggttctttgcattttcatagaatcagcatgtcaatttctgcagcagtgcctgctgggaatttgaagggattatgttcaagatatagtccaatttagggagaacttgcatcttaataatgttgagttttctaacttatgaagaaggtataacatatctctccatttatttaatgctttagtctccctgagaaatctcatgtttttagtgtatagatctttgttacttatttgatttatacttacagttttcataatttttaattctattgtacatatattgctttttaattccaattttcagtttttccttactgacataaagagatacaattgatttttttcgtattgaccttgtatcctgaaactttactaaatcactcattagttttataagttatatatcatgtacaattatatataaaatatagatgatatataacacaaaaactcttataatctataacataaactgtaggatatatattaaaatgtatatatcatgtatgtaaatattttttctattggattttctatatagattccctggtcctctaggagtaaagagttatattttttcctttctaatctcaaatgagtttcatttttttaacttaccttatttcattggctaggatgtccagcacaatgtggaagagaagtggtgagagtgaaatccttgtttagtttctgatgttagggtgaaaacattcaatatttcaccgttgagtaaaatattagctataggcttttcatggatccctttttccagtttccttctgtttctagtatgctgagggttgttctcttctgtcttgttatttttaagagcaggatgaatattggagatatcaaaagctattttctgctcttagtgagatggttatatggtttttcttttttgttaatatggtgagttacatcaattaatttttgaatgttaaatcatccttcagtacaagtaaaattgtaataagttccacttagtcacattatattttctatgtattattggatttgacttgctaaaattttgttcaggatttttcatctattctcataattttctgtttctgtaatgtttctgtatgattgtcagggtaatttaatgctggcctcatagaatgagtcttgacttattttctcatatacttttctggaatagttgatgtagaattaatatctattccttaattatttaggcctggtgtttgggttataaaaatgctttaaaaaacaaattcaattactttaatatatatgggattattcaggttaatgagctcacttgatgaatgagcattggtagtttttatctttcaataaatatttgcacttaacctaagttgttgaatttattggcataaagttgttcaaagtattcccttatccttgtattatgtatagactctgtcataatattatctgtcattcctgttattggtaatttttgtccgaatttgtgtcttctcttttgtattcatgatcaatctgcctagaggtttattcttttaaaaaaattctcaactagcttttgttttaatttattttctgtattatttctgctttctagttcattgatttccactctgttctttaccatttccattttgctgctaactttgccattcaatttcctcttctttgtgaagaggtcattgattttgagacctttcctcttatctaatataggcatttattctgtgctattagtttccttctaagtgctgctttagcagcatcccactgactttgatatgctttgttttaattttcactctgtacaaagtactttctaattttccttttgatttcttcattgaccctgaattattcagaagtgtatttttcccagacatttaaatttttctggagatgttttgttactgatttctaatttaattctgttctggtcagggaacatgcttgtgtgacatgaatgctttcagtctgttgagacgtacatattctgctatcgttggacacattgtttgatagataccaattcggttacattggttgataatgtttttcaggtgtgctatcttgagtagattactttttttgatgattttttgtttgttgaatcaaatattgtgataagggttttactatgttagtggttgctgtaagatttatactctcatctgtagcttatgaaaatctacctttaagtgatattaaagcactttacatacagtataagaaccttgtaatagcatgtttcagtttctgtccttctgatcattgtgctattgttgtcgtacgtattacttttagcatgttataaacgtcaaacaacattactattatttatgtttaaataatgaattatcttttaaatatatttaagtaatttaaaagtatttgcctatgtcttaccaaatccgatgctcttcttctttgtgtagatacgtttttctatctggtttcatttttcttctgcctgaagaactttaacatttcttttaatgctggtcttctggtgatacatttttgcagcttctatatgttttgtaatgtctttatttcatctttgtctttgaaaaacttttgggttggatatagaattacaggttaacaattatttttcttttattactttaaagatattactacagtattttctcacttgtgctattactaaagagaaatgtgctgccattcttacctttgttcctctgcaaaaaaatgtctgtttttcctggctccttttaagattattttttttttaccactgattttaaatgatttgattatgttgtatccccatatagttttatgggtcttatacttggagtacattgagcttcctggatctgtgattttatagttttaataaaatttaaaacattttttcattacttttagaatatttttctcttccccctctcttttagagaacaattacatgtgtattcagctcctttaagctgccccacagcctacagattgtattttcaatttttaaaattgtttattccctctttttgtttcatatgatttctattgctatgtctaggctcactcatcttttccttctacaatgtctaacctgctgttcattccacccagtgcatttttcatccaacacattgtagtttttatctctagaagtttgttgggctctttttatatattacatatctatatttgagtttttgaacttacagattatttgtaataactgttttaatgtccttgtctactaattctcacatttttgtgagttctgcgtcagttttgattgattcctttatctctttattatgaatcatgttttacagattcttggcacatctaggaattttttttttttggttgccagactattaccttattgggcactggatattatttttattcctataaaggtcctagatcatatttctgagacacagctagatttattagaaacagtttaatccttttagaccttaatttaaatgttgttaggtgggaccagagcaatgatcagtctacatgtaactacccactactgagccaatacccttctgtgtactctgcccagttctctgtgaatcttgagcatttcagtgttccttttgggaagaagcactcctcggtcttgtgtgcatgttaacactattatgtttaatccattcaagtagttttctaataggtatgtgttgaataatactcagctgcaggggaccctctgcagatctctggagttatttctttgtgcagccctctcatccttcctatgaaatgtagctgctttggactcttcaaactctcagcttcatcacttgaatataggaagtctgctagtttttcacaatggctttttcttcctaatctacagacaggaaactttgtaggcagtaagctgaagcagttaatagagctcaccgtgtttgtttcttctgtctcaaggatcattatccttttttgcttgataggtatcttgaaaacttgtatattctgttttttggtggaaaaaactttttttcaggcaagcagattaaatatctggtctcttctccttcctctaggccagaaggaaagtttacttggagtatttcttaagggagaaatttatttataaaggcatacgcccaaactgtccctctttatttatcagtgctggtatatcctaatgacatactctctactggtgagaatagttccaccagacagacagacatctgctttagcattcagcagattcttggatagtttatggaatgacttctttcaagtgattatgaatccaaaaagtagaattacaagaattaactagtaatatttaagaaatgcatgatcttgagagtcttatgtgttgttcacctataatcctcagttctcacaggagtaagtagaaatgttagtttaatcaggttatgagaacaaatgaaagtagatattaattattcacactgattttacattttgaagatataaggtgtttattaatgtaaactatttgcttctttctaaaataggggttgtagaatcattgagcttgatagagatctagaataaagtactatttttatattgatcttaaatatgttagtgtagtttcagtaattcctgtgggatcgtcatacagtaattacaattttaaggagtttatgtgtctcaaaatgttatcattgcatatattaatgctattataaatgcagtcataaaaagaaatgtgaggaaaattattaaataattatcagaatgaagttgagttaataggtgtgccatccaattataacttgccctaagagaaatatcagtggaggttgaacatttcagcctcagctaagacatatacttgtgctaacttagactaggaagtatcataaagaaaaaggaactttttattagtatctcctattgacaatatcttgttatagtttagaacgtatgtattataggtgtggattgaactattaaatggaagatcaaacacttttttcagatgttgccattttcatgggagagtatgttgaagtgcgttttggaacatgttaagtaagctagagtgagaaggtatagacaagcatatggggagactaagatgatccatgtggtggtggattagagctagagacatcagcatgaactcatgtttagcttaatatagatacagttggagatacacacacatacacatatatacatacatatctataagtatttacgtatacatacagaaattcttcattttattgtgccttgcattactgcacattgtagatattgtgtttttttgcaaattgaaggtttgcggcaaccctgtctcaagcaagcctgtcagtgccatttgtccaacagcatgtgcttgcttcacatgtcactctgtgtaacattttggttattcttgccatgtttcaaaccttttcattatcatatttgttacggtgatctgtgatcagttatctttggtgttactactgtaattcttttaggcattacaaacagtgcctttataaggcagcaaacttaataagtgcatgtgttctgactactccaccagtcaactgttctcctgtcttctctctccttaggcctctctcttccttgagacacaatgataatatacttaggccaattgatgactctacaagaatgtctatgtgttcaaatgaaaggaagagtcatacatctctcactttaaatcaaaagctaaaaatgattaagcttagtgaggaagacaggttgaaagctaagataggcccaaaagctaaacctgttgcaccaaacagccaagatatgcatagataaagttctcgaaggaaattaaaaagactcttacagtaaacacatgaatgaaaggcaagcaaaacagcctcattggtgatatggagaaggttgagtagtctagatagaaaataaaaccagtcacaacatactcttaagtcaaatccagagcaaggccctgactctcttcagtttaacgaaggctgagaagaggtgaggaagctgcagaagaaaagttggaagctagcagagggttggttcatagagtttaaggaaagaggccatctccataacatcacagtccagggtgaaacagcaagtactgttgcagaagctgcagcaagttgtctgcaagatctacctaaaataatagatgaaggtggctacattaaacaatagactttttttttttttttttttttgagacggagtgtcactcttattgcccaggctgcggtgcaatggtgcaatctcagcttactgcaacctctacctcccgggttcaagtgattctcctgcctcagcctcccaagcagctgggataacaggcgtacaccaccatgcccaattaattttatatgtttttagtagagactggatttcaccatgtttgtcaggctggtcttgaactcccgaccttaagtgatccaccccccttggcctcccaaagtgctgggattacaggcgtgagccaccatgcccatcctaaacaacagatttttatgtagacaaaacagctctctattggaggaagatgtcacctaggactctgatagccagagagaagtcaatccctggtttcgaaggacaggctgactctcttgttagggattaatgcagcaggtgactttaagaggaagctggttgggcatgggggcttacacctgtaatcccagcactttggggggctgaggcaggcagatcacttgaggtcaggagttcaagaccagcctggccaacatggtgaaacctcatctctactaaaaatacaaaaattagccagatgtggtggtgggtgcctataatccaagctacttgggaggctgaggcaggagaatcacttaaaactcaggaggcaggggtttcactgagccaagatggtgccactgcactccagcctgggtgatagagtgagactcttgtctcaaaaacaaaaacaaaaacaaacaaaaagccactgctcatttaccgtttctaaaatcctaggactcttaagaattatactaaatttaccatatctgtgttctgtaaataaaatagcaaagcctggatgctaacacccctgtttacagcatggtttactgattattttcagcttactgttgagacctactgctcagaaaccagattcctttcaaaatattactattcattgacaatgcactttgtcgtccagaagttctaatggagatatacattaggagagtaatgttgttttcatgtatggtaactgatatgttttggctctgtgtcccaaatctcatcttgtaggtcccataattcccacatgttgtgggagggacctggtgggaaacaactgactcatgggggcaggtctttcccatgctgttctctttgatagtgaataagtcccaggagatctgatagttttaaaaatgggaaccaacccaaatgtccaacaatgatagactggattaagaaaatgtggcaaacatacaccatggaatactatgcagccataaaaaatgatgagttcatgtcctttgtagggacatggatgaaattggaaatcatcattctcagtaaactatagcaagaacaaaaaaccaaacaccgcatattctcactcataggtgggaattgaacaatgagaacgcatggacacaggaaggggaacatcacactctcgggactgttgtggggtggggggagggatagctttaggagatacacctaatgctaaatgacaagttaatgggagcagcacactagcatggcacatgtatacatatgtaactaacctgcacattgtacacatgtaccctaaaacttaaagtataataataataaaataaaaaaaattaaaaaaaaataaaaaaaatagaaatgggcatttccctgcacaagctctctgtctttgcctgccaccatccatgtgagacgtgactagcttcttcttgccttccaccatgattgtgaggccaccccagccatgtggaactgtaagtccattaaacctctttttcttcccagtctcaggtttgtctttatcagcagcgtgaaaacaaactaatgcactaacataacatctattctgcagtccatggatcagcagtaattttgactttcaagtcttattatttgggaaatacatttcataaggccaaagctgccatagatagtgattccttaacttggcaatgtaaattgaaaccttctggaaaggattcaccattctagatgccgttaagaacatccatgattcacagcaagaagtcaaaataccaacattaacaggagtttggaagaagttgattctaaccctcctgggtgactttgagaggttcaagacttcagtggaggaagtaactgcagatgtggtagaaatagcaagagaactagaattagaaatggagtttgaagatgtgactgaattgctgcaatcttatgatgaaactatagtggatgaggaattgcttcttctggatgagaaaagaaagtggtttcttcaggtgagatctaggcctggtgaagatgctatgaacattgttgaaatgacaacgcaggatttagaatatttcataaactgagtttagctttattttggcagttatcagtttatgttgaaacaaaatacaagcactacataaaaggactttaaggttcaaataaaaaatagatttaattcattttgtatctatttgtataataaacatctttcttaaattgttgtgtaatttctcttaggtacctgtgcagcacaggtaatttggaatgaatgccacaccacccatctttccctgttaatgatactgagtaaatactgagagcaaagaaatggggaaaacagctcattaaaaggtgtcccatgctgtgaaatgtggaacatatttttcctacttacttctttgattgaagacaaaatatttaggcacttagatggcctttgagagaatctttgtgtcacagtggagctgcttatttgaaataattttttgaaaatattaactttccccatttttaaggtaaaagtattgattagctacatattgttaaactcttctctttagcttcatctgctctctttcttgcttttgggatcctcatcttcttcctaaggaatggcactaatcaggtttgaaagtttgggggacacttcaagttgctcatcatttcccacagccagctttccctctggaaatacaaggtagtcttgtatttacctgtgttcctgtgctgcagaatgacgggtcttgcagatttgttataggacagttggttatcttgtgctcttactttaactgattgattgtcaacataaagatttctggggttagtgaaagaacaaagaaaaagggtgtgtgttatggtgaaatatttaggaactgttatggactgccacttattattttattgaaaaaataagtgtcatttatatattacatgtactattattttattgaaaacatgagtgccatttatatattacattattttcaataaaataatgctctcattttcaataaaataatatatattattttattaaaaaatgagtgtcatttatgtattacatgtactatggtaaatatggagatgaaaggtaacaattctgccttcatggtttttataggctactggctacatacataagtataattcatacagggtaagaaatagtatgaggccctaggtactgcttattgagatgcttgtggatgcatactggggagctgtattctgcttattggcactgatacttatttccttattaatatcagaaaaatatagaactacattgggggtggctgggcacagttgctcaagcctgtaatcccagcactttggaaggccaaggcggttagatcacctgaggtcaggagttcaagaccagctggaccagtatggtgaaaccgtttctctactaataatacaaaaattattcaggcatggtggcacatgcctataatcccagctacttgggaggctgaggcaggagaatcgcttgagtccaggaggcagaggttgcagtgagccgagatcacacctctgcactccagcctaggcaccaaagtgagactcagtctcaaaaaaaaaaaaaatacattgagggtagcaagagttaaaagggagaaataataaaaatgaaacagctataagaggaggaaggaagttaggggtgggagttctgaagataaagcacttctctaataatctgagctccagatgaaagcacagtgagcaagaacagtgcaaggtttcaaggcatcaagttgtcagatatctttcctttcccctccaaaccagctgtctgtcactctctgctctcatctgtacacccagggactgatatgttatcctctggcttccaattgcatttggccaatggagaatcctacaagtacactggagaggagaggagagtgaaaatatattatttttatcttggagcctctgcacagctgcaataaataggctggctgtatccttctaccaaagatcacagctcaaactaaggtagccctttctccatctctctgcttgctagttctgggaacacttgcatcttcttgcttctttaggaatagctcagtggctcctagctctggtgtactgcttattaccttgttggcatagtccctatattaagccctccttgaactatctctatttgagtacatcatatgcttccggactggcacattgagaaaatagagctgccagaacttctccatcacatagtcttcttcccacttcattttatgagtgatgaaaaggaggccagggagagagtagcttttcccaaatatttaagtaaagactagtgtggaatctagacatgccatttcctagtcctcccagttctaatttcccacttattttgaaattttgtaaatatatttctatttagtttcccacttccaaggcttctaatgctgaggctgtgaacattcctacaatcaggttttgagcttatagaaataaatgaagacgctggcccacctaaggggaacagaggctttttattcagagctggctgtagcaaaggagtgagccaccatcacatgctctgggcggcgtatgtgttctcattggtggttgctgcatggtgaagctggagcaggctaactagaagtgaggcatctaatttgattggtttagggagcatatgttttttttcctggttggtcctgagttggaacctggggcaaaaaattagagaagcaaacagtcattgtccaagtcctgactgttctgagctgattattgcagagcatatgggtcagagttctactgtcatatatgatctagctgttatctgttcgtgtagtcagtgcgtcaagcatgaaagcagttgatttgcattccagctttcttactcatcatctgaaggaacctgggccattgaatagcacactaattataatgtccccagggagagttcaggatctctagaaggagaaagtgtggctctctagaggaagtgatggtagaattgggaagcacacagtgggaggcaaatgttgcacagcttggagcagttcttttgacagtctcctagatgaaggcaaatagggacagtgcttgcaggatttgaggtcattcatatgtatttgtgccttggggatataggtttgccacagccgactttcttcataggagctttgtcagtcattagcatgactaggctacaacttctttgcgagctctttcattgcacatagcagcaatattttcagtgaagactaaacagaaaactttattcttacctgaggatctggcattggagagtggccaccacatgagtcaagcaccaagttaggtgaaattctaaattcgattctcctatatatagtttcccagtaattatccactgaagttacagtgagcttcaatggagcgagttcttgaaaaaggccctgtcttcatctcatcctaatccagctgaggatgcagaaatgcagctgttgtgtatagagtaattggtttcttcaattcttgtgaagtcttggctcctactctacctagattttcgttgttttggttgttgaatcacttccctttttcacagtatcttatataccttagcctgagattggctgtgtgatgatcctaaaggctcaacctccttcgtagactcactcccactgcacgggagtctccaaagtgactccacttccacttttattgctttttctgaggaaattccaggcatgataagtcaaatgagaaatttaatttgagaggaaaagagggaggagaggagcctctgaaattacctttacagtcttataataaccttgaaaagtattatatagtttgggggcaaaaggagctgacccttatctcttatcatacttgattaggtctctgtctgaggtttccaggagttgtacctccatagctagtgctgcgtgctcttataatggagcagaggtactgttgtttgggacttaatactcagagtgaactattgactcaggataggaccaattgccgccattgttcttctccagcacttggtagagacagggattctaagctgtcaaattgggataagttggattttaattctattcagtagggcacaattcattgccctgtgatttcctaggggcaaaaaatgagtctgtttttatgtatctatggactaccacaataatttacataaagatattcagatatttattgttacttttctaaccaacatgttaaaaagttacttatgatagctatccaaaaaattgctgattgatagatagtatcttttctctggaaataggttgaatttttaaaaatatttttatttccacatatatatgtgaaaacaaaaagtagtatcacatctttcattttgtttttgtttacttgaaagttgcattctcggctgggcatggtggctcatgcttgtaatccaagcactttgggaggctgaggtgggaggatggcttgaggccaagagtgggagaccagcctgggcaacatagcaagactctttctctacaaaaattaaaaatattagccagtcatggtggtatgtgcctatagtcctagctactctggaggctgaggcaggaggatcacttaagcccaggagttgaaggctgtagtgagctatgatcatgccactgcactttagcctgggtgacagagcaagactctgtctcttccaaaaaaaatctatattctcataggttttcgttcttgttctacaatgtgaagctcattgagttttctagtggttgatcttatgtgtttatatttgctcagaaaataaaaactagaaaatgtgactgtcattatttgtgtaaaatttgaataaagcaacaatccatattaacagttattgaaatattgtgtattgaaccagtgttagcaatccagcattggcaacatcctactttatttatttataagtttttgcaaatcagtatagtgatagaaatgcatgaaattacaatacttggagaactttttataatagggaaagaagctagtgacagaggtgaggatttgttcatgtattacatgaaaatattaatttaattggtttcctttaaaacttttgtataaatggcagtgatagttacagaactaggaaagatagttcatgcttaaagagatctggccttctcttttgttaatgaatgactttaaagttgaaatttgcattaagaatattaatgtgataattttcaaagtacccattagtctaacacttttaggataacaaaactaaattctaatgaagttgacatgtggaagaacagtggtaggtattaggaaaaagtaatctggtcacaataaaaatatgcttttgctcgaaaatctgtcaagataaattccaagcacttcaaaaaatgcatgttaaatgtgctttactacagttttgaaatagattaaaattatatgcaaattaatgcaaatcatgtggcttcaagattaagttttgaagtgctatcttcgttccctggagtaaatggctgctgaatgaatagatgcataaatatctgactggatgactggctgaatgaatgaatcagtttttcacttggaaagctgtttcattctcttctctgccagaagcccagttttatgatcttattcaaaatagaatctgggaggtgggcggttgtaactcaaagattagcctaatcaatccagttcaacccaggggacaccatctgccccggtccagtgtagagcgtaaaatgtagtgcatctgaactacaaaggaagaatgtcatttcctcagcactcatttgttgaataggtatctactgagcacgtattgggagccatgccttatttctgatgcatcacagttaacctctaagcagcaattgctattgtttttgatgttcattctttcttgaaatttcctcttctcttgaattctgccatatttcattttcttccctttccttctacttctgtaaaatttgcttcctttcaatctccttttctgaccttgttctgggagttccctgaggctcagtttttgccctgtgttctttctctgctccagtgattctcaaccctggctatgatcacagcctctgaggtgaggccccaagcatagtcaaatattaaaagctccgtaagtaattcttattcgcagctagacttgagagccttttttataccatagtccggggaattgtttgtgtctcaaaactttacttacgtctctgctgattagtgtcataccactatctcctttcacttaagtgcctgctctgtgcccctgcctaaccaagaagatatttccatttagaaataccattcccctggtttatctccaaaatatctttatatcctgatttttaatttattctttagttctaatctgaggaagattaatctttgatctttctttatttcttgattcaatctcttttgcatagtatgaccaaattaatactagcctcatcaaagagttagctactcttttgccccaaatccttttggctctccattgtctgcagggtcaaattgaaaatccttatcatggaatatgaaacttaaaattctagacccacagatcagcttccttacagaacatctctttgagacttttgtaaaatataagggcctgtgcattccagccttctgcatgaagtctttcctgacttcaaggtccatggtcacctgttccctccaagtcttatggatagtgctgtaaactgtgttatatcatgtaactgtttcattgaagtttggtaaccacctgtaagacaaaatcctgactgatcttgttctgaaacataactgtgaatatgtacttatattgagaagtgagctatatgttatagcagcaatgtaaggaatactaaaagtgcacatagcctattgtaaattctataagttcatagttaaccaacatttactgaatgactattatgtgctaggaacttgcttattcttactgtcttattttgtcttcatgtaaagtggcattatcccaattttaaatgagaagactgagtcctagcaactttaatcagctttcttcaatagaaagttatgactgggatcccagtttgatcttcagagttcaaatcttgtactttgtctccctaattcagtaagctcttaggagagagggcattttcttttcatcaaactcaatgacataggaggtagccattaatatgttagtaaataaagtgagagaaggatcctaggatgatacggtttggcttggtgtccccacccaaatctcatgttgaattgtaatccccagtgttggcagagggacctggtaggaggtgattagatcagaggggtggatttctcccttgctgttctagtgatagtgagtgagttctcgcaagatgtggttgtttaaaaatgtgtagcactggccgggcgcggtggctcacgcctgtaatcccagcactttgggaggccgaggtgggcggatcacgaggtcaggagatcaagaccatcctggctaacacggtgaaaccccgtctctactaaaaatacaaaaaattagctgggcgtggtagtgggcgcctgtagtcccagctacttgggaggctgaggcaggagaatggcgtgaacccgggaggcggagcttgcagtgagccgagatcgcgccactgcactccagcctgggcgacagagcgagactccgtctcaaaaaaaaaaaaaaaaaaaaaaaaaatgtgtagcacttctcccttagtgtgctctctctcctgccaccatgtgaagaagtgcttccttcctctttgcctttctaccatgattgtaagtttcctgacttcccagccatgcctgctgtgtagcctgtggaaccgtaagtcagttaaaccttttttctttataaattacccagtctcagtagttctttatagcaatgtgagaatgcactaatacataggataactggatttaccagatccctctccaaaagtctttctagatttggtcccaagtagaaggcctgccgttggccaaaaatcagctttcagtggtggattgctgttagagttgtttaagtaataccttgctcatagggctgatgctgaaaatattctaaaattatttgtgctatttagctatattaagataccttcaggaattcatttgatgtgatcttacaattgtaggagaggagaattgaggaaaattagcataatgtttatatagtgaagaagattaatgtatggacacctggcatgtatattttctaagaaactattttaatgaactggaatttgaaccctgccattgttacttaaagattcagactaagaaatgctataagaccaagcagaccaagtttgtttccttcaaagggaaagaagattagggaactctctattctctcctatcactgtctctgacgtgggaatgagaccagttcctatgataacagctgtccagcttggaggaactttctgttccaatctttagggaatagaagaccatgggtactctgtagttagagagaagggaatttagcccaagggaggagaacacttattcagaagatcattgtcccattaggtctctgatatatgtgtaaagtacattttctgatttagatttggtaagcaaatgtgctttagaataaagaatttaatcccaactatcattgctggcatgtacctattatactataaaatgatatctccttttattatctaaataactgagtaaattgaatgcttatatttttattaattgaataaataataggcttcacctataaaagtaactaaattctgttgtctgaactcttctttattgctaaaatttagcttaatagctttgttttcttagatactatgttatttaaattttttgcttgaacttttctatgaatagaaaaattaggagtaggaagcagaacttcaaagggaaatgtaattttactcttttagctgcattgctgagatcaaaagcatttgagaagtgacctaggtggccattacacgtaattggaaaagaagtacaatttcttattactgcatctaaaaatgaggacaacattctttaaatatcacgcttatataaaaacttgcagaaactcaatccacatgtcttaattagaagccaccataaagaaagacatttcattgttttaataacttatgttcagaaataaaactgctcttacttaagcactgcttagcagaaacgttaaaatcaagtctagagaaaaagtagaagatggtaatgttcctaagatacatgagaactgagtttggttacagttagagagaaacagaattttttccactcccaaaccagatctattgaatttacttggtttatttttgtatatatttggcatctaaagaatgaattgccttttagacaaaacccttctcgtagttgtttcttttgtattaatagttcctactttgcactaataggatattcctatttgaaaggggactattgcaaacaacaggaatgtatgagttttatgagaaaagcttccagatttttttttatacaatataaatgaattactgaacagagtttgtgacaatgggtatatgaactcctgagtatatgcagatactaactgggagggccacaagtagaatgttcagttattttattcaccttaaaaaatagatatccacgcctgtaatcccagcactttgggaggccgagatgggcggatcatgaggtcaggagatcgagagcatcctggctaacacggtgaaaccccatttctactaaaaatacaaaaacaaaattagtcaggcatggtggtgggcgcctgtagtcccagctagtggggaggctgaggcaggagaatggcatgaacctgggaggcagagcttgcagtgagctgagatcacgccactgcactccagtctgggcgactgagcgagactctgtctcaaaaaacaaacaaacaaacaaaaacaaaaaaaaaagctatcatattctggaccaactggatgattttttagtgtacttcctcaagatttttgcgttcatgcttgcttttctgtttaaaatcagtgctatagtagttgattttttttctgtatggacaagaatgaaataatcattgacatatagaaaagtgaaggaacattgaatcatcgcatggtgtataccttctcggtctgtagcatgttcatgtttaagccactgaacttgacactgtgagacagtgaacatgcaacactgaaagaacagctggataaagcaaaagggtgtggcaaatcatgccatacttaggaacagctgtgcagaaggaggtgcagtggacataagagaagactggcatgggagacaaggtgagtggaatctgcaagagccagtagattcttggctgtgatgggtacgctgggcttgagtagtgaggaacctctttaggtctcagatagggctgtggctgaagcgtagttgtgttctggaagtattgtgggtttttctctccctcagtgtagtagtgcatttcctattcaacgacacctccaactgataggtattaattgtcttaaaaaatagaaaaaaacaactatagttcttacttacatagcacggtatgctgggcactataaagagaaaatgaacgcctggtccctatcattaaagaacgaatatgctttgaaactcaagaactgtacagatgtaaggtagcattattattgtaataaaagaaaaagcgttgttctaagcaggcagttaaacatacagaagaaaatttataacattgaaaataccctgaaactctagctcgttacctaacagtgatttcatttattgtgaaaaatggcgaatgcaaattgcatgccttattatggtgtcatcatcagcaatttcatcttgcaaaaatggacaccacactatagataaatcttggagtccaagtattcagcatttaaagtgtttgtcagtattcactggcatctttgaatgttatagctggggaaacgtttagataaccctttgtttttctcacaccattgaaaaaaaggtaaagagacattaaagagtagccccacatttcttgactgttaacacagcagagccagaactccctgtaaagactctgcttcccagatcaatattggtggtggtttaatttaacccagacatctcttgacttatgccccttctgattgaaacccttcgatatggtttggctgtgtccccacccaattcttatcttgaattggagctcccacaattcccatgtttcctggaagggacctggtgggaggtagttgaatcatgggtgtgggtctttcctgtgctgttctcctgatagtaaataagtctcaagagatctgatggttttataaaggggagtttccctgcacaagttctgtctcgtctgccagcatgtaagacatgccttttgccttccgccatgattgtggggcctccccagccacgtggaactgtgagtccattagatctctttttctttataaacacccagcctcaggtatgtctttgttagcagtgtgagaactgactagtataccttttcagtgtcttaccatttgcttgaaataaagtccagggccgttaacgtgacccacaagcccggagtgtcccagccccacctacctctccaaattcatccctgccattcttcccctgctcccatgccacaatcgcagaagcctgtcttcgtttcttccagcccaacaaactcccatggcaggaatgttgcaactacttcaactggtccccattcttcacctgggatgacacccttctgctctcatatgcaatattttttttttaggaactaccttggcatttcttgacctttccaactaaaccagctctctctgcacttataatttataacattgttttcctttgtggtatctctgattgtttttatgtatttatttgtgaatatttgctttatgtgtttcctcagctggtctgttctcttcatgaacaaatgtgtcaattttgttccttgctgtacacatagtgcccagcacagaatacagactcaatacataaatatatattggtgtttggatggaagaggaagtaataagaatatgattgtgataatcactggaaatagaagtaatttgtcagttttacatgattgaataattgaagcaaatgtctgccaaaacaagttagaatcctgtagaggagctacattataatggtattgagcaaaatatctttaggtgaaggtagtattatgtatttctgggcattacaaaaatataagcagaaatatattttaaaataatgagattttagagtagcatgtatatgtttattaattattatcctcactaggagatcaaaacagttgattaagaggaatacagttccacaatgggagagccattttgagaattaatagactgtagctggcaaaaggaaaataggagttagagcttagcaaagggagaggaaatttcttctacccctatcctcccatagttcagcagcagagtgtttattaaaccaaaagtgatcaaatcacttttactgtgtcagcgatgggctgaaaaaggcacctgcatttcatgaattgatgagtaattgtttttagtcctgattctaagtaccctgttgattgcaatagtgtgatgtggttgaaaaagcactaggtttagagctagaacacctggatttgagtcctagtgtcaccacttaccttgttcattagacctggtacaagtcacttaacctcactgagggtgattttgttaatgaaatggtaccctgcaggattcttgcatgtatcaaataagataattacaggaaagctcttggagaactggatgcagtgctgaaatgagctctgtggagtcatgtatatatctgtctctaagtaatgcgcttaatgcactttgtgcagataagggtgctacacccagtcctctgatctggacaagctcacgttccactgggtagatgagatgcatgctaagaaatgtgtcttgatgcagaaattatcacaatgccacatactttgggaatttatagatgtggggaagaagactccttactgagatatcactgaagcatttttggggaagaaatagcatttaacctggaccttgaaacatgagtatggtttctatctgacgttccatttcttgttccattgatccctccctgcccctccttacctctcctcccctctccttatgcctctcttctcttacctacccttcctgtctttatcccctgctccgtttgccactcccttccccaaacttgtattgggaaagcagtttgatggttggaaagggtggtttattgatctaagatatgaataccagttcaattttgaaataaaatacagatggtccccaacttaaaatggtttgacttgagattttttgacttatgctggtgtgaaagcagtacctattcagtagaaaccacacttccagatttgaattttcatcttttcccaggctaggaatatgtggcgtgatcctcacatgtgagttgttcaagacttcattataaaataggttttgtgttaaatgattgtgtccaactgcaggcttatgtaagtgttccaagcatgtttaggctaggctaggctaggctaagctatggcgtgttctgtatgttaggtatattaaatgcattttgacttacagtggattatcaagatagtaagtcaaggagcatctgtactccatttattgacaccccatttaaaaaaattgttaaaaactatcaaactatgaacatgaagtgaaggatgcatgtttcgatgtagtctgaaattagctttcaacatgaatgaagtgttaggttttagcttcgtgggcaactttgtctgattttcttccattgacataaaaatagtctcaggcttgtgtgggaaaattaagtatatagatactattgcatttatcaagggagatataacttgtggattcattctataatgttttacaggagaattttttttatctcagaaataagaattttacatctctacaagtaaatcagaaatataattagatacataaattcataaacatacaaaataggtaaaatgattatatggatttctaaaagtacctttaaattggctgggcatggtggctcaggcttgtaatcctagcactttgggaggccaaggcacgtgaattgccagagctcaggagtttgagaccaccctgggcaacatggcaaaaccccgtctctactaaaaatacaaaaattagctgggtgtggtggttcatgcctgtaatcccagctattcaggaggctgaggcagcagaatcgcttgaacccaggaggcggaagttggtgcgccaagatcgtgccactgcactccagcctaggtgacagagtgagactccatctccgaaaaaataataatgataaaataaaatacctttcgattatactatagagcaaaaaaaatcgtgtaggtgtggataagtgagtatgtatgtgagtgtgcatgtggatttgcttgtatgaagacatgaagaaaatacaaagggaaactcttatttctgagaggtaggattgtgggtgagttttttcctttatggttgtttttattttagatattttctacagtgatcatgtattttattataaaagtgttataaaaatgagtttttacatgctatatagaactaaaaacacttacaaatgcaaaaacattatgtcttttgaaatgcaaggcctctacagaaacagtatccctcctgtttttaaaatcacacttttgatacccaatgagatagttcaccttcggtaacatgaggcgtttaattaacatccagtggggtatgattggaccccctgatgtgtcatactttcacgtgaattattatcttgcaacatacattctagtaataacaatgacgttatctagtaagttttcataaatactaagactatataaaaatcttagcttttcctctttatctcttagacagtacgtagttcaaagtatactttttacaagagcccgtgtcttctaaaaatctagggacatgttagaaattaatgcatttagtttaccatttttaaataactgagttttatttcattgacataaaggatccaagattttaagtgtttggattttattctcttaaaaaataaaaattacttttttttttttttttgagacagattcttactctgttgcccaggctggagtgcagtggtgcaatcttggctcactgcaacctcctcctcccgggttcaagcaattctcctgccttggttcccaaatagctgggattacaggcacgtgtcaccatgcctggcctggtctttcttaaagagggctttccctgagtgtatacatccagctttgtaagttgatgaatttggttctcagtaagtttgtaaagagaccctgctgatgtctgatcatgaggagctcactattctgtaggaaagaccataccctagttgggcagctctaatcatttcgaattttcacctgatttccgcctctctgtaatttccagcccttggccatatgttgttttctggaattctaatggataagactatttgctctatgagataacccatcacatatttgaagaccactatttgtcctacctaacttttgtttctaaggctcaccccaacaacccacccccagtttggttcattcagcagaactatctggagcactgtgccctaagcattggggctaccaagatgacaatgataacatcaaggagctcacagtataatggggggagagacagatacatacacaggtaaaataagtgctgtagaagagtgatcaacaaagagctatgaaaccagtaagattctaaaaactgactttgtgctgagcaagaggaggcttttcagaaaaggtcaaggttgaatcaggttttgttttcgttattattattattatttttgagaaggagtctcactctgtcgcccaggctgcaatgcagtggcacgatctcggctcactgcaacctccacctcctgggttccagtgactctcctacctcagcctcccaagtagctgggattacaggcacccgccaccatacctggctaatgtgtgtgtgtgtgtgtgtgtgtgtgtgtgtgtgtgtgtgtctttagtagagacggggttttgccatgttggccaggctggtctcaaactcctgacctcagttgatccacctgcctctacctcccaaactgttgggattacagacatgaaccaccatgcctggctgcatcaggttttgagtcaaataaaatttttctttcaaagaagcagaggatggaagggtatgctgtgcagggccatttttgagctatgggtacacatatacagtgtgatagaagaaataagacctagtgtttgatagaatcagtagggtgactgcagtttacggaaatgtatatttcacatagctattagagaataattagaatctttctagcatacagaaaagagaaatatttgagatgatggatatcccaattatacttatttgatctttaaaagtatgaatgtattaaattattacatgtaaccaaaaacatgtacatctattgtgtatcaatacacaatgaaataaaaatttaaaaaaacaacaaaattgcaagacgttgaaagggcctaacctggctccctgagtaaaaattgtgtaagagggttctagggtatcctctgttcactatgtgtagatcataagttgaggaaagagattttaaccatgaagttaaagtcatatgctacaccaaagtaagctagatgttgatttgccaaatctgtagttaatttatctctgctgggctccatttaggatttgattttaagaagggagttgtttgccataatgttacaaggtcagccctgttctgggtttctattagctacagttagtgttttggagtatcagagaaacggtgcttccttatattcagctcatggcatcaggaggcacaaaatctgtgcttttacagcagcataaatttctctggtcaaggtcagttgtgttagcaaggcacatatcatcgtatcaattttacattttctaagtcattttgtagacattttgttgagtaaaagtattctcttacttctagtaaggtagtttcaggaaaacacttaagtattatatatgtaaaccaaacagacttttcccattgattaactgtattttccattttgattttagaaatgtttaccttaagcctggccacagctttgtggcgacttcttcaatgtactccctgcctcaatctgatgtggccatgcactcgaaattcttaactttctatttactcttttagagagagatgatttgtataatctttctcttctccacatcccactgttccctgtatgtccctccttttctcttgtgcctcattttgtgtgtgcatttgacaacaaatgcagggaggaaaacaaacaaactgagtataatcagcaagaaaaaacatcatcttatgaactggcaaccaaattcttcatgaagaatttggtttttgaagaacaactgtttttgttcaagataatactttgaaaaaagatttgtcatagaagtttaaaaacttgaatagacagctctcattgtctgtaaggctaggtttctgcggcttttaatgtgtaagagacttgtcccatttaacaataaatattttagtgccacttaaaagtataattaatatatctttcttaaaagtggtattccctccctctacgtatatttctctttcctcagccccaaaagcacatattcagggagggaaggtaagggatttacatcctttttccatcactacgtcaaaacttatacaatttatacaatttaatattattaaggtagttaatgtagcagttcatgtgaagttactcagtagaaatactttaaatcatataaaaatatagctgaatataaattgaagggtcagagattaagggtgaagcaagttttaaaaatcagaagcatttccaaattcaagttatttggggtagctgtagagaaataattgaatgacccttagcaatattttaggaaaacttttacctaatgaaaaattctactccaaagctgtgttttacttcataaaattaatagaaagtggggaatatctctacacttccaatatcatgctttcctttagtcctagtaaaaagggacccagaatctttgttttaccctcccaaattacccactttaatacgaatacatgaaaatagattttaaaaaagaagtgaataaaatagatgaatttgtcctttttttttttaactatggtccttagacaatagctttcaactctccatagaactggaacaacttgcacgatgttgactacagtaagataacaaaattgtatattgtatgaggcaaatacgtgtggttgtcttatctaaccacaatgataagtacggtagtgtcatccagggtttcatcttctgcagttcagttacctatggtcaaccacggtcgcaaagtaggttgagatcattacaatgagatattttgaaagaaagaacactttcacataccttttactgcagtatattgctgtaattattctttttcattattagcattgttagtctcttattctgcctaactgataagctttattgtatgtaagtataggaaaaaacatagtgtatatagggtttggtgctattaccagggtcaggcatccactaggggtctggaaacacatcccctgtgggtaagggaagactactgtacataatttgattctttctttctttttcccaaatagtggtcatatttgatcagtcacctttgctcatgaagagcacattggcaaggacaacacaaagaagcttgttctgcaactcggttttcttatgttaaatatttagttttctgcttgcttcttcttatctgtttgtacttggtaaggctccctccttcttatgtgataggttggatgctgccggagaggttactagtgcatggaagctccaaaacagagtggaatggaaaattatagcctcaagggtatccttgggaaggagccagacaaaaggtgcatgcccacattgagacaaagctaaagcaaaactaccaggtgttagaaaacccagagcacatatacaagaacaaggcaaaaaattcctgttactctaacagtatgccttacttttctttaattttacttatttgtaaagtagacaaatgcccctgttgtgtcttgttgagttacaagtgcaacaagtagcattctagagtgggatgttactgtcagtgcctgttttgggtcactttaatatactgctgtttaattgattttatatctgaagatgcaggtctttaacatggacagattttcataagatcactggaatactggctttcttttgttttgcgatgagggcaaattttctgtggtttatttttccccatttctggtgaaaataatattctcttttcctcttctacagggaagatggcagtttcctcagttaaacttaggatctttgtcccttttaaataggccattgtataaaatacaaatgatcaaaattgtatcacagtaataattagctaatttttttgcagaagttttttggtggggtttttttttggtgtcaacacaactttaaaataacaaataataagagaaaactttttaacattgtaggaatatgtgaaattgaatagcaaactcaatttagatgagttcacatgaataacatacttcaggttggtaatattccagaaggttcaactgcctcatagaaaattaaatctctgaaaaattccccgactaaaaatcatttgaaaattctaattttttctaattatttggattttcttatgttagatttcatttcatggaaggatattgagtttgtgtatattcctgtgtgtgaacatgtgcttgtgtgtgctcttaatagcggttatttttcaaagcaatagtctttcaagcctttctctaatctctccagcatctaaaatgaggtgatataaaactcccaggtgggtactaaatattagatttgttgacaccagcatgggtgcttgagtggtagtgggaaaaagaaaaatgattgtctagagtttgtatgctacagaattgaggtggtttcagctgctttcatttcctttaaagaataatattgtttttttcaaatgaggaggattaagtaagcaccttaaaaaaagaggagcaatatattgacaacatctggtatgaagagttattataaaaggtaagaggatctgtgccagaaaaagaatggagagggagattctctctaataaataaatttcttttaaatgtgcctaaaacattaagggggtttttcccatttaaatttatctttgaaaactccctagagaaggagagtggtttctgtaacagctggttagaattgctgagcaaatgtctggaaaagatgattttgaaacaatgtgttttgtaatgtttaaacattttacatttttgttgaaacctgacttctgatgaagaaaatcgctctgtacagcaggcctgcgctgtgggctgcttttctgctttctctagagctgagtcactgaggactgctaccttagctcctcaaagctgttaaatttctcgaagggaagctgagtcattaggaaatgtaccagaataggagaaagtaggtcattttgctagacttggcaaaactttcatcagcttcagattcgcaagatctgcagttctcaaactccagggttaatcagaatctcctggagggcttattcaaacatgcgtgtctgggccctcctggcagagttcctgattcagtaggtctgagctgagccccgaggatctgtatttctgacaggttcctaggtgaaggtgatgccgctaaacctcggcccatactttgagaattgttacactagtgaaagcttggagagaaaaaaaaaattagacaagccttccccaaaggtttggcagtcagcttcatagttggatggaggaggacactaccatttattaatcactagatactgtcccagtcttgacattcaatcttccatccaattctgtaacatgagtcatggtatatctatgctgcataatcatctgtacagaactcacagaactcagttagtttgtttccttcctcttctctcctctcctctcctttttcttttttttctccattgccctggctgaggtacagtggcgtgatcttggttgactgcaacctccacctgtggggttcaagtgactctcctgcctcagcctcttgagtagctgggactacaggttcacaccatcacacctggctaatttttgtattttcattagggacgaggtttcgccatgttagccaggccggtctcaaactgctgacctcctcagcttcgcaaagtgctgggattacagatgtgagccaccgcgcccagtccagaactcagtttccataatcaacctgcccagagtttaaagccagagaagcaggtgcatctgaatttctgcctttgtctgtttagatctaaaggttcaactctttctatcaaaacatacttttgtacttgttctcaacgtgtctttatttcctcttctttttcattcatacatgttattcagaggatctcaaaattctttggagttttacaaaggaaaagttcaatttccaaaatttttttgcgacctgacatcccctactatcaggtaacactaatttatttaatattgactttgcttatgagtaatggcaatgcacaaagctgatgaaagccgaaattccatcagatggatttagcaaattaacaggagagagaaactacttagtttgtgagaaactactcgtttgtaaactatgcaaaaaggatagacattgtcttacctaatcacaaataagcctttcccaaaggaagtggttaccttttaaatgtgtgcacttatgtttgtttttaatccaaatttgtgccaaggaattatgtaattattatttctgtacaaaagttacttagccattcctaaattatcattcattgatgtctgagagtaaataattttagtaccactacgattaaattgtagcaggaaaaaaaactatgaaatagactcattctgagtcattgcttatagccatttaaagttgattagcaatgttagtttaggagatgtaaaaatgcaaaattttatttttaagttataatattttaatttgtaatttcaatgagctataaaggaatgtttatatttatggaaactctatgaaatataaagaaatgctctcacagatgtcattttagatatattaagtctgctaaattcaaataaaagttttggtactaacgtgtgagcacctggatggcgggggctgggtgttatatatttttacatcgaagatgaagtcctgcatagtgacttgcatgtgaataggagtcaggaagcattgaccaaatgataaagcattgctccagctgagttacaggcctattctttttagctcaaatcaacccattaaattatttgtgagataaaatttttctcaagtgtatttttccaataagaacttgaaaaagttgtacgttttattttatttgaaaatgtattaataactttacactattgactttctcctttcatatatttttaaatatgagaaggctattatctgtttatatgtgattatattgccatttggcctcaattgctcttactctcctcccccactgggccacatttctaggtcaaattattaagggaaaaaagatgcaggattttcaagatataacctctcacagagtatatatcttaaaagaggaaaatgtatcctgcacgctgaggattacctatggctaaatgagagttgaaaatagaagcatgtgttaaactggaagtcaatttgagagaatgtaatagaggacagtctgacaggtgttaatgttaccctcaaagggaataagctggaagctataaaaagtgtatgtagccaccactcattatgatacatgatattcttgctgacttgaagtaggaagatgaaaataactagtttgtttaaagctgcatattctgataatttaggatttaactttctgctttgaacaactttttcatgtggaaaaccttaactttttataggtataatttgttatttttaataatgcttataaaagtttttttaaaaagtaagctgtattgtagaaatcatcaaataccaactagaattatattttaatattttatagattttactcatagagtaaaaattacattgttagatatgtaaggggtggtaacaccttttaaaaatcttggttgtccttgtttgttctgtagtttatgaaaaacagagattctaaagattgcacctatgcatgaaatctgatttgctcttttgtgcagtataagagtatggctgatttctttcaattctgagaaccttacataggagaccccaacctctacataggttacaagtgaatagactctgatttccgttgattttatttcatgtaaaactataaccttcacaactacacatcaatctcaaacttctttgaatggctcactacttaaaagtcatttttccctaaatgatatgtatagatataagtgatctgaaaaatattttcaagattttattgtccttcttacctatatgcagaattgacatatatgcctatataaaagtggaaaatctgtatatgatgaaacaccatacgtagttaaaatacaagagccagattgagaaagaatatctgcagattgggaatagaataattaatggtcaaaggattggtatcttgaatatgaagaaaagtttctataaatccaaatagaaaaacaaatgaagaaaaggaaaaaaaatgcaaaggttttgaataataagtttacagaggaaaggaagggcaaacattgacaagatgctcatgctcactgtctaggaattggtaattaaaagaaaatgctttcttaagattggtaaaatggataaggagtgataagatagattcagtgttggctttctacactggtgtgggaaggcagttgctcttcatattaccaatggtggggatggaaattgctaaagcctttttggtaggatagtttatgaaacaacttttagaactaaaaacaatgtgtaacttttgatcaggcattcaaatgctaggtatctgttctagagaaatacataggcgtgtacactgcagaattgtaatagctaaaattaatccctaattgtcattgctgtggacacaaagttcatacgttgaagcattaaccctcaatgtgagtgtaaggagttaattaaagtaaaataactttgtgagggtggggccctgatatgatagggttagtgtcttataagaagagttataagagaacttgtgctctttctgtttctctctctttccccagctatgtgtgtacaagtacaaacaaggtccagtgagcacacgagatagccaggaggcttcctatacctgaaagtatttcttaagccattttcttcttcgtacagatgacacattacctccttgttggatgaatgcattgccttcttgttgagaaaaaaattaattcttataccaggagattccgactgcctgtaatgtgttcagttccctgaatcacagggaatatgcccagtccaccattcctttcaaactcatcctctgactgtagatgaaaggagataattagagtcgtagacattgggattgctctcttataaaatttactctatattttaatatagtcatatttgaagtgtgttacttttatcataatctgtatatatgctggttcaagaatagagtagtcatcacacagattaaggaatagactatcgccacgtatttctatatcctgaaactatatattgtttaggtatgtttgtttcttgaggaaaatgtataacagctatttttctgtaactttctttcttttttttttttttgctaagcattgtttatgttttaactacgttgataggagtagctgctgtcctctattgctataactatagaacagtggttttcaaatggctttgactagaagccaccataagaaatatgcttaaattgcaaatcagtgtgtatacacatgcagaattgaaacaattgaaattttagagttagcttgtctagattcatgaaaaaaactggagagtttaacatggcataattaataaggtcttaaatagtaaatacagttgtccccctttatctatagcttcattttctgtggtttcagttatctgtggccctaaaatatgaactgaaaaattccagaaatacacaattcatatgtttcaagttgcattccattctgaggagtgtggtaaaatctcgcaccatctcacctggagcgtgaatcatccttttgtccagccttttcactgtctgtaggctaccatccattccacctgctagccttctaagtcatcagttcagctgtggtagtacttcagtgcttgtgttcaagtaaccctcattttacttaataacgtccctgaagcataagtgtagtgttgttggcaatttgaatatgctaaagagtcattgtcaagtgccttaagtgaaaaggtgaaagttctcaacttaataaggaaaggaaaacatcgtatgctgaggttgctaagatctgtcacaagaaggaatcttctatcaatgagattgtgaagaaggaaaaagaaatttgtgctagttttgctgttgcatctgaaactgcaaaagttacaatcattcatctcacttcatctgatcacgtaggtattctatcatttcacatcctcacaaaaatgaagagtccagtgcaataagatattttgagaccacattcacataagttttattacagtgtattgttataattgttctattttattatttttattaatctcttattctgcctaaagtttataaagtttataagttaaactttatcataggtgagtatgtataggaataaacatagtatatataggattcagtactatctgcagttttaagcatctactggcggtcttggagcatatcccctgtggataaggagggaccactgtttactgtctgtcttttaagtttattcagttctgtttttagaagttagtaagtgtagggttttaatttgacaattattatcagcacattgaaaaatattactgcactgttttctggcttccagaattgctgtcagaatatcagctgtcagcctgggcaacattgtgagaccttgtctctacaaaaataaaaataaaaaaaaatagttagctgggtgtgtggtacatgcctgtagttccagctcctctggaggctgaggcagaaggatcacttgagcccaggagattgaggatacagtgagctatgattgtgccattgcacactccagcctggatgatagagtgagactctgtctatctatctatctatctatctgtctgtctgtgtatctatctattatttatatatgtatctatatatatattttaaacatatattaaaaataaagtctgtattcttaaactaaaagctggcatatgtgcttgctaacttcctggatctcttactttgaattttaccatctatagcttatttatagtcttcatttcataacatttttcaagtaaaattttatttgactttgttttgtttctcatttagagtttcttctgtctcattagaagataaagtttctagcttatcaataacaattttaaaaatcaatctttaaggtcctttttaaagctcttgttaagattctttaagttgttttctaatttctgtcatgattgtatcattctatttctttgatttagaggttgcttggctatataaattgactttatgaaaattcttgcaacacataattttagggaagaaaaatgtcacaaattagaagaagtggctattggaaaaagacatccactgagatttaagagtcaaatttggggtctattaatcttgacagaataattagagtgctgtcatttttcaagcagatagaaaaatgaatactctgtaggacatacaggacatacagaatctcctgagaattatgattatttctaattcacaaattactgtatgcatattatttaaaaatagaaactcttttggtaaatatgtttgtaattaagacttctaacagccattcagcattgctgtttcaatatatgactaggctgaatattaaccttcttgcaaccttttacgtgagtaagtttgaggcactgaattctaactaatatgagaagaatcttggtacttagggaatagtgaagtgctgacatctttgtaatctaacttctgaaccttttcatgaaatttaaatgttattacaatgttatcatcccaaaacgctaatttgcataatctttaaaagactgcattttcatacattaggccttcatgggcatctaataaatgacagttagtgacacgttacttagcatttatcagaaagaaaatgtttttcctcagaagaaaaaaatgctttttcaaaatgctgttcttcctttctaaatttgttagtgtattcttactcatgactagagcttatgtttaaattagcatttttttttgcagctggcctaggtaatcattgaaaattgggagttaaatgagttattattttatagaaggataagtaaattgtcatttagtatttctagaagcaatggtggtttctggtaatggagaaattgagaattagtgcatagcaaatgaaataaattggtatttttctaaaagctgaagcgttaacgtattagatatgtgcacatatctatgcatatgcccatacatgtctacaagtcttttggagctggcacatgttaatccaggtctcagatggtagtcaatcctgtcaaacaacttgcatagtttgccttggcaaaattccagtatttgatgctttcagatttgctacttgaagcttagtttgtattttgcctccattttgtttcatggaaaacagtatgtgatgtgagatttggtggcatgatattcctgttttgttacttttcttcttccgatatttctactaaataaacaaatgggaaatgagtacctcataattgaattcattcttccaaaagagaagaagtaattgaaaccactgggttgccttgatattttgcagaaagtaaacctttcttggacaactgagattgtctatttattgtgattgggactcataggcttttgagaggtaaacctgggtgaactttcttaatcagtcaaaaaaaatatgtatatatatatagatatatgtatatatatatgtgtgtgattgatggggtgagagtgatgaaaacatgtaaaaggcagaggcagttactgcatttagtgctcatagctcagcaggaagttgctgatatgaactcgttgtattcatattcgcttcgtgttagtgggcagtgctggcagggttctcaaagcccctgactcctactggatggcatcactctttttctaccttagctgagcaggcactgaccaaatgctgaaacatgtgactgcctatgagtttgcatagtttgtgagctagggcagggactgtgcttaatgtatcttttatgtttttgcataatgtcttacagtgctccacacatggtatacgcctgtttttgtattggtagcttgatcattatgactgtctggcaaattacactgaatgctgtacaaggaatcatattgtttccatctggtagagtaagacaaagactgtagaagtacagtcttttgtagaaggcttgcatttggtttatagattgtacttatattttggcagaagttttcttaaagtggggagaatgcttctcaggtcaggaaaacttgaataatgtaagtattcccaaatagaatgtcgatgttcgaagccattataaaatgaagcatagtgattaccctggtttataccagaggtactccattatttcccatttattaaccttggtgaaacacacacttccctttctgcttttattcctcagtcaccaagaaaaattgctaaacaaaaatagaaaataattcaagtctgcctgcctgtgtgagtttgctatttgtaagccctggaagggtgtggtaagcagtaatcatctcctcctccccaccatcatgctaaccaaagtgactttcctcaaggcttctgatttaatagaatagcagaagaatattagaatgagtagagtactgttaaactaatcagcttgttgtcagagtgaatggtaaacattgcaccaaactaggttctgaatgtaaactttattttacagagttttattctaacattaactttaaaatgagattcagtgatagttattgttttgctgtgactatccaactgtatttgagttttccattaaatattttatacaggttaaatagattagaaatcttggacctatgtcattattaataaatgggcacattgcaataaaatatacgttatcaactggccaacagaatgatatcaacaagaagaataaaaacacatggatgtagcatttgacaatccttttttttttttctcggctcactgcaacctctgcctccaggcttcaagtgattctcctgcctcagcctcccgagtagctgggattacaggcacccaccaccatgcccggttaatttttatatttttagtagagacggggtttcaccatattggccaggctggtctcaaactgctgacctcaggtgacctgcctgcctcagcctcccaaagtgttgggattataggcatgagccgccacacccagctgacaatcttttttcaataggtggttttgattgatgaaaaagtttgggtatgaaatcactacaactcccacagagtgatataaggaaggtgttagaaagtaatgacagtagtgtgtaacaaatgactgccctttaacacattctgaatttcttttagtcttttaggtttcttgccacaagtttttttttttttcttggcaaactctgctttcttaatagtgttttaggcggttattttgcttttaaattccagtggagttcagtgctctttaattttcattattgccctgtgggaaatactgcgtatatatttatgtgtatgtatagaggcttgtatgtatatatgtatataggggagattctggttaaggactgttacaacttagggtaataaataaagttaatttcataataaagcatatgactgtgtatttcctcttggccaatagtttaaatgttcatattgtaaaaagagagctgtcctattttttcccaatgcaaatcagaataatgttataaacatgaagtaaaaaaattttgaattgatatttaaatactggaaaaaaaatctatacacagcaagcagctttaaccagtggatttctagggattagtatatttctcaagaggctgaggcgttgtgcctttggtctcagtcttaatgtgcttgagacatgcaataattctacagaaatgcaatgctccagagtgtcttgtttcttaattataaaagctgttctaattattccattttaagtgctaacttatttaagttttaaaggctgagtaactcagctaaaatttatttaattgagatggaatagggactgttgaatatttagttgtcactaataaaatatagtatataataaaggaaagcccactacaatctcatttgtcttgataataaaaagttaacatttttgaagttctttcaggtcctaagttattatatggtatttctcaattctttgtattcaaaatgtaatatggaaataatgaaatattaatgtcttaaagttcattggattgtttaattagttatcaaaatattcatgaatttgatagaaagtgtttctgttcattggcattatttttaatattctattttccttataactatttttttaatgattatcaccatgggcatcttatcattcatcaaattttatcaggtattactatattctagctccgatttgataaacatatgttccataggaactattaagttatagattgtagtaccatgtgcaatatccataataaagaaatacaaggagaattttagaattaaaatagaggacatctcactcaccttagggagtcaaggaagtcgtcttggtggatgtcccacttgggctgaattttgaataacagttttttagtgctggcttgatgaagcctgaatgtgtgaaagtgaagacagaatgatgggctgggttgtgttgtttgaggccaagagttcagcaaactgcaataatcatttggtcttcattcagttctccactttcattatacagaataagtcagacgtaagaaagctggcaatggaagtcagtactggaacttcttatatacacaagctcagcaaactaaagaatatgctgacaaccataacaaataactaaatgagtgatgaacgaactttagaaacaaagaaaaagaaacagaggatatgttcaatcattttttccccacagatattaactgagcactttgtatgcatttagcatgttgctagaagctgaggagtcatcagtgaatgcaataaatatgatccttgcccatataggcctcattctagcaggtgaagcacattttaataaataatacacattttaataagtaattgcacaaataagtgtataattacaagttgtggtaaatgctaggtagaaaaagtaaaggagttagagaggatagaggagttttatataaatagagttagggatcaagctaacatgtctgtgggaggaatgttatgctgagacataaaagaagagataaaaatagcaatggaagagcaaggagtagggcatttttggtagagagaggagcatttgcgaagatcctgagaaagaacagagcttggagagttcaaaacactgaaagaaacatcatgagaatgaaataaagcagatgagggaacaagtgatgtaagatgaagcttggaggggtaggtggaaaggaactcaggagagtcaagaaacagaagagtaaattggaataaagatgtgaggagccaactctttcaaggtctatatggaagtagtgctgttcagtaagaactcaggatttttccttcttggatgcagcaaggaagatggataggtgaggtagaagtgatgagggcattccatgctaaaagtataggttagaataaagacaaggattttcctgagaaaaatgaaggaatctagtttggaataagagggggtaagagaagcaaggcagtatggataatctgttgaaaggtaatgataacgaagcagaaagtatgaatcttttcaaagataatgataatgaagcagaaagtggtgaaatgttctagaggactcagtaatggggcatcgttttcacccaagggtgaattgatgaatattccatactgaacacaccatgctgagcacatagcagatactcaatagctttcagaatcgttgacctcctcgggacatgaggcaaaatgtctcctgaacagaggatagcccatagttctagtcaaaaagaacaaatattagcaaaatatgaatattagtctcatcataaaggtatgtacacttctgaagcagctgtgttgtctgggatatacaccctggggttcatcactgcgcgccaggaaaatttaggtcctggacacacacaaggagtttaggaacgaaggtttttaataggaagaaaagaagagaaagaaaaaatagctctttctgtagagaaaggggtctccaagcaaaaaggaccagtgggcggtggatgcgctgaattttatagtcaggtttgaggaggcagtgtctgatttacatagggctcacagattggttggattaggcatgacatttacatagcgtgcaaggaaggctggtgtcaatatattgaccctgcctgggcaatgtagtgagaacctgtctcaaaaaatgagaactactaggctcaagcagttatcctgtctcagcctcccaagtatttgggattacagccacatgccacagtgcacgactctaaaaaatgtattttacatgatcacatgtaacctgaaaatacgcatatctgccgggcgtggtggctcatgcctgttatcccagcactttgggaggccaagctgggtggatcgtgaggtcaagagattgagaccatcctggccaacatggtgaaacccgtctctactaaaaatacaaaaattagctgggtgtggtagcgtgtacctgtagtctcagctactcgagaggctgaggcaggagaatcacttgaacccaggaggcagaggttgcagtgaaccgagattttgccactgcactccagcctggtgacagagcaagactccctctaaaagaaaaaaaaatatatatatatatatatataaggaatttaaaaatatataatacattattactaactgtggtcaccatgcagtgcagtagatcattaaaacttactcctccagtctaatgaaactttgtaacctttgatcaacatttccctttcccccattctttctccccattgctccatattctggtacccacctttgtactctctgcttctgtgagattggcttctttagattcctcatgtgagtgagatcatgtggtatttgcctttctgtgcctggctcatttcactgagcaaagtactctagttccatctatgttgtcccaaaggatggaatttttctctttttaaaggctatatagtatttcagtgtaaacataccacattttctttattcattcatttgttgatgaatagttagattgctttcatatcttggctatttttgaataatgctgaaataaacatgggagtgcagatatctctttgacatgttgatttcatttcctttggaaatatatccagaagtgggattgctggatcatatgataatttttatatcttttaggaaactccatactgtttcccaaaatggttgtactgattgacattcccaccaacactctacacaaaggttgcctttcctccatatcttcaccaatatttatcacttgtcttttttgtaatagtcattctaacaggcaggaggtgatatctcattgtggttttaatttgtatttctttgatgattagagatgttgagcattattttcatatatattttggtcatttgtatttcttcttctgagaaatgcctgttcagatcctttgcccatttttaaaacagttttctttctgttgaattgtgggagttccctatatattttgaatattagccccttatcagatggacggtttgcaaatattttctcccaatctaggttgtatcttcactctgttaactgtttcctttgttgtgcagaggaaacaatttttagtttgatgcaatcctgtttttctgtttttgctttcattgcctgtgcttttggaatgctatccaataaatcatttcccagactggtgtcatggagcatttcccttgttttcttctacttatagtttcaagttttatgttagatttctttattcttttgagtaaatttttgaatatgttgtgagataaaagttcaatttcatttttctgcttgtgaatatcccattttcccaccaccatttattaaagagactgtacttatttccaattttggcacctgtgtgtcataatttactataaatacttagatttctttctgggttttctgtcctgttcattggttgacgtgtctgttttatgccatccagtaccatgctgttttgattataaaagagttttaggattttcttttttagatcagtgtgtaatgcctccaggttttttgtttgtttgtttgttttgctcaagattgctttggttgttatgggtcttttcttgttccatatttgacccccactccacttttaaatttaaaaaagaatctctcacttattatcagttattgctgaagccagtgaaattcatattattatctgttttgcatcactgtttgaatgctgcatatcaatcccctggtgaactttgagcatcttttttcaactttcttcagttaatatcattcagattcatgaaggcacatctttcttcagcagttcataaattagcagcatacattttaggggagagccttcatctaaaagtaactctttatcttaagaataaatcctgtttgtatctgtctctcaagctattggtgcctttataagttatcttatgtggaagagaatgtaggggaaggaaaatttgttttctcacccatttctaggttcatgactgaggcccctataggaaaagacagatgaatgagaaaaaatcatacaaatgtacttaatataaaagttttatgtgacataggacacttcataggaaaattaagatgcaaaaaaacagagagacctgtgtatttttatgctaagtttgattaagaagttgataattatagataaatatttttggacaaagggagtatgatctaatggaattgaactgggggacaggggtcaaacaaggccttcttgttcatattcttctctgtgtcttcagagataagaatgtttctttcctccaagcataggaagaacacttctggggagaaagtcagagagtgacatcctcgattttatagcctgcttcaggggacaagagccaagggaaggtgagaatggccttcctgcttctgaagttttctcaaatgtcaagatgacataattagagattctgaaccccattaagagctcatcccaagacaaaaggaatgagacaaacatatccttctacagatccttaatcgtctaaagggagggttagtcctgaacacttggtaatttggatttgtctttcaaacggtacttcaatggaatttatctgggttcacagttccaaactttaaattatggtataaatggatacaatagtgtatccataatattgtaaatggattcaatggattccataagtttaagtatatataaacagcatatttaaacttaaggaaactagttaattgctcattttatcaaatacgttaatactatcatattaaccttagttttcatcaagtggtaaaatatctttaaagttaaagtaccagagaggatcacctcaattgaaacatgttcattgcagcattatccacaatagccaggatacagagacaatctaggtatttatcggtaaagaaactgtggtgtgtatacacaatagaatattattcagcctttttaaaaaaggagattctgctctatgccacaacatggatggtcctggagtatattttgctaaatgaaacaagccagacacagaaaggaaaatactacatgaactcacttatatgtggaatctaaaaaaaaaaaaaaaaggaaaatgaaatatatagagaggataaaacagtggttgccagagttggggtaggggaggaaatagatttaggtcaaaggatgcaacatagggtacattaatgatagtgtattgtatttacgatttttgctaaatgaatagattatagctgttcttgccatgggaggggaaatggttaactatgtgagatgatgggtgtgttaatttgttctacaacagtaacagttttactgtatatataggtgtatatattatatatacatatataatatataaaaaatatagtaaaatacatatataatataacatgttatataccttcaatatatacaatttatttaaaaactcatttatgatttcagttagaatttttaaaaacattatgcttcagagtatttattgcttttaaccctcacaaaattatgcatcattctcatgtttccaatattcacctgggtttgtctaagtatttgaggaaaagtaaaagtttttaagaactttattattctcaaatttcagtgaaattagaatgtaaaatcttagatgtgaatacttttacatgatgtttattaaatatagtatgcttcaaggcaaaaaaatatgacattgaagaccaatatttaatagccaattttttcttttcttttttctttttcttgaagtgagcagaatatgcataatgataggtatgatgaaattttatttagtggtattcggaagtattcgactttaacaagtatgtgctgttctgttgtgaataaaaatttgggaaataaaaactagaaactttactctgcacatattaggagtataaaagtagattatgtttttagaaatggatgagaatagccatataccccaacatcaagatctatggtctacaaagctaaaagatgtaaaagaaatgtggaggttaatacaataagagcaccctcccccatttataaaggtcagacatgcctatggtgtacattgctatctgtaaagattggaaaacctcagatgttgcatcttaaaatatgtacattttctgacatttgggtagaacaatataatttcttataaatgaacttgattcctgacattcagttgaatgttaatttaattttggtgctagtatagcaaagtcttccacatgtcatcgtagttgagttatcctaggagttttgatgactgggaataaagagggcctcccttgaaggctgggcagtgatggagacgtaagataaattcatagcagtaacaaatctagaaagaaaagccctagagcataacccacagcaaatcctgaaactctcttcctttaaggaatttcctggtggccttagggaggatattaatggaactctttaggcttaaccttgttaagggactgttatgcagcccttgttgttttctactttaaagtcaagaattttaagcagattagaatgaagaatagtgcagtgcagcataaagttagtattatactgttaataacattcatctgaattattaatttctgccagcagttgcttttaatataatcaggattaactgtagaaatacggattgttttcccctttttgcttttttatctgaagaataatttattgtaattaagaatacattataaaaacaaaaaggaatcgcagctataaaaatgtgttatatcaatgactgattatattaacattctatagctgtctaatttcttaggctaaaaaaaaaatcaaaggaaattgtttcattcaaattgttgagctttttgccatctttagaaccagtcagctagaggagagtgtttgtgacgattaccaagaatggttaaaaccaaaaggtgttggtttgcttgctctctcttctggtgagacagccatttgaaatagcattcaggcagcgtggcctggacgctgaagcagagcttggcagatggtaccgcaggatggagaaactgctggcagatggcatggactatttgagcaacaaagagacttttggctaccaatgctaagagttggaaagaaagaagacgacaacttctccagtgctgccagcttgtatacagaaaacgttttggcagaatggagactggtaaaagatattcaattgttaactgcaaggaaagagaagagttgttgttattaagtttcctaagtgtgctccctctggtgtgattggaacgtagtttcatatggaagagccctttagagatcatctaaaccaactatgctgactgaatatttggacacattcagtctgtttttactactgaaaagatatctctttgaagcattatttataaaaagtttaatccatgtttgtttttgataagttaaaaaaaaatctttattgaagaccttatttcccaggcttcatatgtgcagattagcagtggttcttgtttagcattgggctaaaataatgtacagtgaagtcaggtttggctaatatgacacaaaaatgtagagttttccctgcaaatgctatacataattgaatcactgaattacttagggggttatagtcattaccacacatctccaatttgttttctggaatctctgaagccacttattacaaatagacatttagttcctaatgatttcattgggggctgctacaatttttcatttgtagctttttcacctattgctacctaatacctttctctctctctctctctctctctctctctctctctctctctctctctctctcgtacctcttatttgatattgtgtttccagaattaattaatttagatgactttcacgtagtaacttttatccacaagtaatactttaagcagaaatatataacttggtttttctaaaataattaatttaacatatcaagaatggtattaagaaaaatatttggggatttttaaatgaaatttaaagtggaaatgtattacttgaggtagaaaaaccaattctatacatattcttaatagttaaatctcctagctcactgaagtttaaatttttggtatctcaattattcagaaaactgctgagattttggatgtaattgaaaatgctactgaattgagatcaaaagggataagtaagttatattcagaatagtgtcactggagatgcctctgagccaccaaaattaccatcataatgattatttaacttttgagaagtactcttggcttttggactcttaccttacataattttctgtcagtctttatgatccagtttttctcagtctgtagaagactagtagcatctgactggaattagagggctgcaagagggaagcatgcagataaaacggcacagagacaggttcagataagaaggatcccataaaaattactcaattaccaaaatgaaatgatggcttcaaggcttcagtggggaaaaactcatttcagttgattcagttaagacatttaaaagaagacatttctcaaaaaaaaaaaaaaaaaaaaaaaaaaagaaatggctgaaagttttgtcacttaaagggcaaatattaattttttagaaaattcatttatttagaaactttcactccatgtttatattaggtaaagagggtctaaatcatgtatgactgtttttaccaatgaccaattttcataagtggaaaattatgtttcaaatctttgcttagaggaatatgcctttttagtctacgtatgatatccactcccagcgatacagctctttttccttgtcctcattttggcaatgaagctggtcttgctggaagtgcagtggaaacctctgggtcacacaagccaggcagccctcactgtgacttcgtcttatgcaagtcacatcactttacctccctggaccttcgttatctcacctggaaaataagggagtggcttttaatgtccttctttcattaatggctgaagcttttcctgtgattccagggcataatttattaaaaggaggaaaaattgatattgattagcatatatgaatagatgtttgattatcaagcacttgatacccgattccacatttaccactggactcctttgccttttagtactaggttcctcctctgtaaaacgtgagggttgatttaggtagatggaatatataaggtttatactacatcaaagactgaatgggttttagttaaattcatgattctctttcttttttgttctgtccccaagaacctctcactaggacactcacatctgttcttgtcaccagagcctcactttttccaggacatcccttttcccctctactgttgcagaactttcccctcagtttagtttaaaccaggttcttgtcacacgaccaggaaagattaggcttgagacacatagaggggtgaggaacagaacttattgggcaaatagtaaaacaaaaaaataacactcagcaaagtgagagagagtcctgctagcaggtttctcaccttacagattgaatcccagttcaccacccaggaactgaagaagccacaggctcctcccaactgcaaatggcgcaaacctccggaggctccaccccgtcctcccagtgtgcaggtgggcattgttcagagaaccagtcgggaaagggcgggctccatccgggaccagcagtctgttttttcagccttcaggctgttttaggcttgaagatggaatttcgctggggacccttggctgtctcctgtctctatcaatacctcttgcctcctctcccactgtgataaagtctttgcactgtgggatgagacacatgaggccttattcattgttgcatctccaccttccagtctgatgcttgttgaatgaattaatgcagatacctcttgtatacctgactcccagtgcctcatcctccactggagcgccatccttgcatcacctttcttactctggtgaggagtcgtactctcagcccctgtggtttgagacccccacaaccacttctggtatgaagacagacagacacccctcattctcattgtcagacactaggcattaggaatcggaatttcagctcttttcccatagaagcaatatttaaaattgtcacagctttggtattttaatataaatacagtgtgagttagaacttcggttgcctggctaaggaatctaaccattatttacaacacagtgttgtttctttggaaatttctattctgggttccaagtgactgacttgcaaataaactttggtaagacagtccatttgtagtttgcgaatggcctttaggccatatagatagaaaagcatattgggataagcatggatctcaatgtgcatgaaatttgcagtgcctcaaagacagatctttagtgtatgacaaaagacagagagtattcccaaataagtctttgacttttcccacagacaccgattttcatgttaagaaaaaccttttcagaacacatctacaagagcaaggtacagttgaattttatgaaaattgaatttgaacaagggctttatgattgcaaactttgtcaatccccatggtttataattccaaaaaaaagtttaagtgtatcactttcatttaagctgtcatctgtgttttgattttccatgggggtgttcctttcatcttgatagcgcttcactggggagattgtttgattgccaatagactgtttcctattctatctttatactttcccttttctgtgtcttaaagtcaccatcgtcatttgcctggagcacgacagcatactcctaagccgttcctgtacttctgtccttgccctgccccgtgccagatttgcatatggaagtcaaagggagctttacaatgggacccatttttttccatgataaaaccatccagtcacaataaattgacttagattaagatgtaaacttcttacctgggacttgaaaagccccaaatgatctggccctactatcttctctaattcagcatgaagcacaacctccttttgactcagcatgtcccagctaaactgacttttttttattgcttgaccacccaacatcctttcttgctagaactaatgcaatggctgtttcttctgtttgtttgactctcagaatctttcttagaattaaagtgtccacgcaaagtccccctattcaaagagtgcttctctgaccaaattatctaatatagtctaatattaaacatcactttcctctttctccaatataacaatgttttgttatcctcctggcattcgttactatctgaaccaattttatttatgggcttaaggtctatctcccacttttgaatgtaaactttgagacagaggacattgtctgattttcttaccaccctatacctggtgcttagaggagtgtctggcactttacagaaactcacatgtgtaagtgagtgctttgatagattactggcctctgtgcattagataccaataacactcttctgatgtgacaataaaaagtaccacaagacatcatccctggttgagaaatatgatatacagcaagaacaaaacaatcccatcaaagagtgggctaaggacatttgaatagacagttcttaaaagaagacatacagatggccaagaaacatatggaaaaatgctcaacatcactaattatcagggaaatgcaaatcaaaaccacgatatgatatcacaccacctcactcatgcaagaacggccataataaaaaaaaatagatgttggcatagatgtggtaaaaagagaacacttttacactgttggggaaaatgtgaactagtacaaccactatggaaaactgtggaaatttcttaaagaactaaaagtagatctaccatttgatccagaaatcccactcctgggcatctacccagaggaaaagaagtcattatacaaaaaagatacttgcacacacatttatagcagcacaatttgcaatcaggaaaatatggagccagtccaaatgacttccatatgcaaatgcccatcaatcaacaaatggataaagcaaatgtggcatatatataccatggaatactactcagctataaaaaggaatgaaataatggcattcacagccatctgaatggaattggagaccattattctaagtgaagtaactcaggagtggaaaaccaaacatcgtatgttctcactcagaagtgggagctaagctgtgaggacacaaaagcctaagaatgatacaatggacttcggggactcgggggaaagggtgggaggcaggtgagggataaaagactacaccttgggtacagtgtacactgctcaggtgatgggtatactaaaatctcagaaattaccaccaaagaacttatttatgtaaccaaacaccacctgttccccaaaaacctattgaaagaaaaagaaatagtgatatagaagaagagtaaatcacagtattagtattttagagtggaaagagtaaaaatgatgcaaggaatccattttcaccatttataagctacatggacctgtgctcttgttgcttaatctttgaaccttggttatgagttattgtaaggattacatgaagaccttgctttcaggacagatcctgcctgtggccagagctagcctcccaatccacctgcttcccattcatcctcattgtgtaccttcactgagggcttgtaccagagcattgtcatgtcctgtgtaacactgggttctttgagatgctcagtatttctagaattttgctatattgttttatttcactgtttttgattggtcattactcatatccagtggagaaagaatgaatctcaagatgtggcatggtagaatgctaacagacaaataggtccagggagctcaaaatccatttccaccatttattatcaataactctgggactttttgttctggttacttattctctgtgagcttttgttgtgagttattgtgagagttaaaagatataaatgaaacactaaaatagggattggtacatagttagtacttaatatatgtgagctgtcttctctcccgtttcttaaatttctcaagccatgtttacatacacaaacaagtatatttatccatacatatctgggtaatcattcaataatttattcattaaaaaaaggtattgacctcctacttattaggtgccagccctgttctggattctggagttggaacaacaacaaaaaaatacagtcaaaagcagtcattaacagtgatgattgtagattatgttctctgatgagttgtgtatgtgattaaaagatatatatgtgtatatatacatatatatgtgtatatatatgtttatgtatgtatatgtgtgtgtgtgtatatatatatttaaatcaccctattctatgaacagtaaattcaggggcgtaatcgtttgaaataatgtattataaaatattgtcataatctcagcactttgggaggctgaggcgggtgtatcacctgaggtcaggagtttgagaccagcctggccaacatggtgaaaccccgtctctactaaaaatacaaaaattagctgagcatggtggtgggcacctgtaatcccaactactcaggaggctgaagcaggagaatctcctgaaaccaggatgcagaggttgcaatgagccaagatcacaccactgcagtccagcctgggcaatgatagtgaatgagactctgtcgcaaaaaataaataaataaaataaaataaaattgtccttatcaaaacagtgctttcctaccacttggtaaagcatttgttgattttttttttcaggaatacaaatgcaaaatattgaaagcctgaacttttgacctaattagcttttgagtttttagccctaacaaatctgagtgatttaggcataaaacaaaacaaaacaaagcagaaaacagcttttcagcttgataattctttctggtttgttatacctctcaacaccttcaattctcaaattagtgctcaaggtctgcgttggtggctacatatatttctgcattgttgtgtcttccagtctgagaatatctgggttggaatgaatttcctctcagggaaatgggtgaaaataactttttgcaaaacatgactgcatcatccccgagcaccattacaacatgcttaatgggctgtatatagtatttttattatcttataacttcagctcccttaacttgtttgaaggtctttaaaatgcacctttgagcattgttccatgtgctttgtgtcccttgaataaatattatacccctattgactttttaattttgaaatttgataacagtagtgaaagagaaatccctgaccattttatgtgttttgccacttcatttcatatagcttctttctctttccggcgatgtatttagcagacatttctctgttttgaatgggtgttatttggttgttaaaaaaataataataataactaaatcccatcgctgcctgttaatctttaactgttctttaactgttgatatgagccaaatgggaagtgtttgaaatattgaaactgactaacctacaccttctactgtaaaaagtatgggagaggaagcagtgtcttgggctggcaaggaatccttatggactagatctcagagattgatggagcagggtctgagggactgtgagtgttccctgagagaaacatcctaggtgccatcctgcttagggcattgaacattgtgaaagatatctgtatatctcacttctggggtggtgaagggtctatgtgaatgacttcatacaggtctctacaaagtaagtcatggccagtctgggctctataaatagatagggactgtgcttaactgtcagtgaatctgagatattttgatgcctgttatttgttattgaggatttattatgagccaaagatagtgtgctgtacttttaaatctttattttatttaaccttcaccacaattccactaggttaatattagtgccattatctttattttataaattaaggactgattcataaagcttatataatttacatatgttcccagtacccataagtagtggaactatagtagaaggatgttgtacataatatatgaggtttaaaaattatccacacccatgccttagttgtagaattttaaaactagaaaaattttagaaattatccagtcttcctccactatcaccagtatttcagatgaggaagaccgtgaaacccggagaatttgagtttccttttaaataccctgatcaagctctgctactgtaacaacttcatgggaggaactctacttttagtgaattacacatcaatatcactttttactgtcgttgtcataaatactttagatttagataggtcacgaatgtagtatatttaagttcaaaacttagagtttcttaatctgttgagctggggaggattgcatgaggcaggattgagtgggactagttaagttgagacgatctgtctggactctgcatttgtggtggagatcccatgcaatggcaattaggtagaaagagcatgcaactttggtgactgacaatttgtacttaaaagccaacaacagggaatcaggtgttatacttatccgtccaactacctctgaaatacatgaagttacatgtatttaaaaggtaaaatgagatattccctgtatctgacctgtgtctaatacaactttgtaggctgtttgaggttgatgtattttttccttttaaaggtttttgttgctatcaattatctactttatacagatcagatgtgatttgtgaaagcaaggaggtattatatgtatgatttttatggggctttgtagccctattagggatgggtctttttggtcttcttggttcatttcacagtttctcaaacttatgtgtggaatccacttgaagaacatgttaaaagattcacatttagaaattctggagtggggcccaggactgttctttcgctcctccttgcctagcagcccaggggattttgatacgagtgattcataatcaaactttgacaagcatagagttacaagtaggattgtgcttctgatctttctaagatgcctctgatgatctttcatgtaaaaaagaaatatttagcttattagaccactgacaatttctgggttttgccaaatctaaaattagagcctgaagattgtatttgtttatctttaccgagattatatttaggaatacctaggaacctaaggaaacaaaatatttcaatgacttctttgatgcagtatgaggttttccttttaatgtagacagtttatttttgttggctgtgattctttttatgcagtcttgttacattgggctgagacatggaggtaatgaatatttttcttatctaggatcaaagaatactgaaaacaggaaaaaaaaatgtgggtattcagtctcatctctacccttaactttttgatattcctgccttgctctcctcaagtgttttggaattgttttaaagatatgtgtctggtgtttttaatgttttgtttataattaaatgtcagaatatccttgttttcacaatggctgcaggtgagtgatatccagtcaattaccagttttctgttacctcagccactggtcagcatagtgttttctgatagggctgtacctactgtgagaacaggttgcagaggacactgattcctcctttctaccctcttccagacctgcctatgcatactagtgaaacaggtatttgttttctctggataacaccctcttcgccctccatttctctgtctctctctttcttgcccttttccaaggcccccaatataagcattttggatggggtggtagagaaagtccccttagattgagaagccagtaaacttaagtatgctgtcaggcttcaagccaaataaagtgctgagcatgacaattaattggataactaccagaatacctcttactgtaactataattcagaatatccctagctgaagttaaaaaaatgatgttaattaatttgaaagttgctaagagtccctatcaaatgcctgtgctctgtttgcatgctaggttttggcattgtgagcaagaggagacaccgatagtgaagctctatccttctgctagggatttaatactcttgacaagccaggaaataggtggtcatgtctctatctcaaagatggaggagaatgaaatgctcggggtaagcgtttcaagccagagctgtcctggttgattaaggtcatctgatcactttgctaagtaaaataggaagatgaggacacatgttgaagagtttgcaagaagagcaaataattaaatattttcttttaagctctgtgaaattaacttggaagttttgttgcatttcagttgaataaaaataatacacaaaaatgagctggttttttaaagtgaagaaagaggtgcacataatgtttcctttgtgtcttttgaatattttatttggaaactagttaaatttgcttaaatacccatttgtttttggtttcagggattttgatgtttgttttgagatcctcagcaacaaattatatttagagaaatgtgggattgcctattattaagacattttaaattgtttgaaaatatttttaaaacataataaaagatttatgctttttaattttgtatcatcaaatccaaactgcaactccttatgttttaatatataatcatacatacatatatcatatattgggacattaaagtttagggaaatgcagtttgcagtaatgactttagatgttcttcctggctctctttaattttaggcccaaagttattttcctagctgtattcacattaattgtttagtattttactgcatatttttgtgtttttacattacagagatatttgtagactgttcatgaattgtaattctctttttaaataacccccttttggggactttgtgtgaatttccctttgatttattatagactataaacaactcaacagactctattgtttgaataaaaaatactaatcatgtcatatttctgcatcatatcctgatctatccttcaattttaactttagaagtagcttcctctttgttttcctgagctcaaggcagaattcagaacacttagaacaatgtatgagacagaataacattttcaatggggggaaaaaagttcaattctaatcccttctcacgttatgttttgtattttttaaacttgaagtgctagaaaagtaaataataatgatatgaatgatttttttccttagaaaatcaactgtcaattaactaatgaatattctttttaatcagtgttaattgacaaatttcctgcacttacaaactcactgcttgcataatagtttcattttgactcttcctgatttcccttttatgtgttggtagtcctgttgggtgtaattctgcattattttctaaattccctcatctggagctagatggagctatgagatcttttgtaaatgtatacaaggccagtggctcttcttcatctacttgtggcattaagtagattaaaacccaattttaaagctttcttgtccctttattcttaaagacagcatggaagagaaagtctggatatctaaaacacagtcattaaaatggacagtcacacagttctttaattatcatttactactgagcaactcaaaaaacaaaaacccaaactcccaaaatcaaaacaaagaaaaacacccggctacatatatacctattcttaacactattgactcaaaactacattaaatgtgttttcattaaaaatataattatttttgttttgttttccaaaagattataattctctcagaaatccacacaatacagaaaatgatgggaaaagcatatggcaattgttttaggacttatctgccaaattttatacatacacattttatagatagatacatggatagatagttatatatataacatacatgtaatatatatgtatgcatataattatataaaaatgtagaaaatatttcacaaggaaggattaaaagttttgcttaaaaggttttggataaaatgtcatcttcagtttccctgtatatagggacatttagatgatctcgtcactgtatcttatccatgcctacagagcattttgggaggaaaggtattcattttttgtgtttgtttagttttttgctcagctttttattgagctagctatgcggttttcttgacttgttattcagtgtgtttaagtcctaagagatgtgcccagactgctgtcatactgtttaatatctgttaggacagaagttgttaaaggtcatctacctactttgagaatctaattgtaataaattcttctgtgtgtttctctaattggattaactttagctctatgctgttcacatatttgggtaattatatgaataattttcatttacctaatttggcagatactacataaaccaaatacttatttgaactctacaccatcttgctttttaagttacttgtaggctttactcttgagtcttttattgtgaattgtatccttttaaactttaatgtccctctatattctgtccttatttgcttctcaaatctagagaggagtaaacagtattttaaacaatttctaaagaagtaagaggtagggaggtggttcttgatttggctttaataagcacttcacttgaagaaagggcattttactaatctagctattaggtaagtaaaaagataaagataattataatgtaatgattataaaataactagtagataattaacagatacatagatagaggtgttacatgtgaaagacctgagcagtgaagctctgcataagaaggacagacactaaagcgtatatcctttacaggtagaatcttgttcaggatctgctttttcttgctttacacacaatttgactaggcttcattctcagtcttttaccctaaagaggacgtgaatgccattcagtcctcacaacagtaatatatggcgaaagctgtttttcctatcatagcaggcaaggcaactatagctgagtccaagccccaggtctgaaagtgggagatttagactcggttgtctgattctcaagccagtgatttccccagccattcattattcatttgtcccccagacacttcatcacccatccgcaggactttcctaagcacgtattttgtgccagacactcttttaagttgctaaccatttaatggtatgtgagactgatgaggtctgtgcatccatagaatacaaatgcttttgagggtaggcaaacagtacatgagtttgaaaaacaaaacaacatgaaattacaatgtggtaataaagaaacaggatgatgtgtgagtagctagaaacagccctgggtaggttgatcagggaatgtctgtctgcagaagttacacctgagtccacgtaatgattctagctgcaaataagaaaacaaaaatatagtaggcatctggcagtgagagaagaggcaggctaatagtaaacaagaagggcagataggaataaaacaaaactaatggccatgtgtggtggctcacacctgtaatcccagcactttgggaggctgaggggagcggatcacttgaggtcaggagttcgggaccagcctggttaatatggtgaaaccccatctctactaaaaatacaaaaataagctgggcatggtggcgggtacctgtaatcccagctacttgggaggctgaggcaggagaattgcttaaacctgggaggcagaggttgcagtgagcccagattgcaccatcgtactcccgcctgagcgatgatcaaaaaactctgtctcaaaacaacaaccaccaccacaacaaaacaaaacaaaacaaaaaacaaaactaagtgtgggagctctaggtttaggaacaatgaatggccccttttagcacacatgtctctcatgacagccctgtattacatcagggtacattaattgatgcttatgatgattaaaataatttatacaaaaagatgcgtgaattctgttttaaaaagtaagcactcctgaacaattttaggaaaagtactaaatttgaaataagttttggtgcttaaaatgggtaaagaaccagtagtaaaacattcacctcaaaagacaattacaatattggggatgacagagaagagagaagggaggcctaactgtaacatttatatttcttagtttttaaaagatatccagtacatatggatatacaaggtagggtaaaattttttgttatttttttttaaaaatcgaggtataattgaccaacaaaaggcacaggttttacatgaacagcttgatgggttttaacaaatgtagtcacatgtgtcaccaccactccaacagagacgtagctgtttttcattatttcactaagttgccatgtgcctctttccaattagttcttccccacccctgaggcaaacactgctctgatttctataatatcaccctagcttggttctacaagtgcatataaaaggaatcatagttgctattttgtgggacttgggttctgtcattcaataatttttgtgaaattcatccatattgttgcaggcatcagtggtttgctccttttttattgctgaatagtattccactgcatgaatatatctcagtttattcgttctcttctttagctattcctgtggtcaagagatgataccttgtgtttttaatttatatctcccttatcattcatgatttgatctttttatgctttttaaagtttaatcaaggttttcaacaattttactaaaatataacttacataccaagaagttttcccattttaagtatacaattcagtggtttctggtatatttacagagtggtacaaccatcaccctaatcttaggacattttaatcacctcagaaacaagccttttactcattggcagtcactctccattcccaatctatataattttaacagtcttataattttgtatattctttatcaaagtcctagtaaacagctctctcggctttatatctgtacaccttaagcatagtgatggtgtgttgccttctagttttcaattcctttgtggagcatcttgtgaaaatctttagagggagtcaattagaacagtactctcaaacttgaatgtgctttcaggtctccttgataaaatgcagattctgattaggtgggtctggggtgggtctgagattctgtatttccaaccaattccgacatcatgcccacactgccagcctggagaccactttgagcagtgtggtaagagactttggttggcctgccttgaaagagaaacggtgtcacaaagactgtatgttgtaactcttttatctgacaatttatgtgcacatgaagtttttgttctcagagcagttcttaatctgttttgagtttttacaagttcgttacttctctttgtaggtatgtaaaaaggaaatggactttgagagttttaaaggtaggattaagaaggcggccctaaaaatcttacagtatgtcattggtttgttgataactcactgaagagcctgctgaagaataaataagaaacatctgtacagggtgaatctttcgggttctcactggggacctgctgactctgagtaggctttcgtcaaagcctctttgcagggtcttgcctcagtttctggatccactccttcactggcttctccgaaagcctttttaggacctggatttgaagagggaattgtactcctgtttgcagaccatggcagtggagccagttgtaagctattggcctgagtttcggaaacagagtggtgtatccatccttgtaacagtcagggagtggattatcaatggaaacggaagtaaaaaggacatactgtattcagtactcacattgaaaacattaattttggatttaatctttgcctcataaaatgcaataatccaaaagctcatttccagaaccctctttccaaatataatagcttcaactgaatcaacgcttggtaaacgtgatgtatctctagtttaaatgcaaatattttcttaaagttggctagaaaggacatttttgtagagcaaatcaaatttttccactgttcatcatgtaattggagatatgcttctatagacaaaactgtcgttggattgagttgaaggattttgattttatgcaaaaaatttagaagtgacagacaccccatgctactctaagccttagcagatgcctaggcctaacaagtaagatgcgaagaagactgtacatcttgatttttttgtttttcattcttttaacatgttggaactctgcctctactcagggagttgctccatcacgttcatatagaaccctcttttgaggccaagtaaccccaggcactcctaatccagcttccttgttttccctcatgtccaatttttattgggttttaagttgtattaaaggtatattttaccagtaggggcctctgctttatattgtctgacgtcttgactgaaaagcccttaattaggaggtataagttatgtaaatcaaagcgctccactgtagcaatttcatataaccattttatttaaactgaagtacagtggacccttaacctgtgtttgaactgtgcaggtccacgtacacatgtattcttttcaaccaaatgtggattgaaaatacagtactctagatccctgaggaatcgccacacactctagatccctgaggaatcttcctcaatggcacatatgcaccatggaatactatgcagccataaaaaatgatgagttcatgtcctttgtagggacgtggatgaagctggaaaccatcattctcagcaaactgtcgcaaggacagaaaaccgaacaccgcatgttctcactcataggtgggaactgaacaatgagaacacttggacacaggaaggaaggggaacatcacacaccagggcctgttgtggggtgggggtagaggtgagggatagcattaggagatatacctaatgtaaatgatgagttaatgggtgcagcacaccaacatggcacatgtatacatatgtaacaaacctgcacgttgtgcacatataccctagaacttaaagtataataaaaaaattaaaaaaaagaaaatacagtactcagtgagatggaaactcacatagaaggagggctgacttttcccatatgtgagttatgtgtgcctgactgccagactagcgtatgtgcagtttttgataactataaggtcctggaaccaatgcctatactgagagaagactgtatatattaataattcttactgtccctctactcttactgtccctctaccaaagaatttcaccaaagatgccaggattcacaaaggctgaatataccatgactttctgaattgaaacaggaaaacactggtaattttttcaagtactggaggggcatcaaattaagatttatttagtgatggtaatttcagtaagtttgcagacaggagaactgtgtgtttctacttcagtctagccaaatactgtgtgtcagtttggcaataccagttaggagccctacattgttgttcatttcagagagaataattctggctacagcaatttaactatggtatgtatgttcttagaactgagtaactaacttcctcagactgaacctattaaattagtttcaatttcctgccaaaatttatagacaggttgtaaatgaaaaagctgcctctgcccttcattatcactatgtatcatagtttttaaaataaaaatgttatttacttgcatctactgtcagatattaaactacagaggcatccatcagcagttttgttggcactgtaaagaaaaaagtcatgtaacagcacacctggctttagtgttatagcatagagttagtgttgcaaggtgactttgatatgtcagaaaagctaattatgtgccatcaaaggactgaagaaattgccttttttaatgaaaagtattttataggaggtgacaatgatcttaagcaaagcagtaaaaccgggtgtataattatataaattctttaaattcttattagacttagctaattgacatgttactgttcaataacacagaaaaaaattgttaaacataaaaaccagagcaatgattttgaactgtagagataaagtctaatcttaaatggattcttttgccatttttccttccaaatacagtcacaatttttccttgacattatttatggtaatgcgtgtttttattttgtattaaaaaaagagtatagcaaattttaataagaatgaactgttagtaacatatatatgccccttcaaataaaaatgcaattttcttagctaatggtgataaagtgcccgagtctattttcagttttcttgatacgtatagatgtaagtgtgtttatgtgtgtcacacatatatataaatttaatttttatttctttgaggagccatattgagggggaatgtgaagtgggtcctgctgtttggtatatcaggattaagagcagaactttttattgttagctctgacagaatgtatgtgattattagtgatgtctttttttagaaaattgtaaattataggaatgctacacaggaagaaagaaatgaagcatacagtagttatgtaggtttacaagattgacaattttttttttccttcacagaaagttcagtacttaaagcagaaagctgtaattgttggttgctgtagatgcccttagctatttggaatgtggaaagatgtatgctataaatgttttactcctataattgtcatcccttcagaatggttcaattatagctattttgtaggaaaggtgcatgaagaaacaatttctggcagcattctgtaatgaccattcaagtttttaaaaaattgcaaatgtaaaataaacaaacccatttttgttactggacagggagcacagttcccaaagcctcctgtttcacatctcagatgacaggtcaagcaggggccgtgacaggcaacccacaaagtgtagttggttttggtgcttggggtaagaacgtctcaggacatgctcaaggctatttggatttatgaaactgaaatgtcttgatttaaagtgaatctttaaggtatcaactgagccaggtcatagagctctggactgtgaggaaggagttgggttcattaatcctcatgctaacccatgtgtgttgacactaatcaactaacctcacctctctgagcatcttacaatgacatggtcagctctaagactgcttagattatatggcaatgctacactcctggaggaaaccaatgtgaaaatggataatctgtaaattttcttgggaaccaaatgcctgtatgggttgtgggggtatagtgcaagattctgaaataactcctgattgttcttaggtatatgccctttgtaaagctattaaaggttgttaattaccagccttaaaagattggggaattgaatgtttggttggaggcggtttggcctgtattcttacttttggctagccaaattgtgtacttacatctgacagcttaattctgaaattaggtttgcaaagcccggatatcagtgggcttattctttttgccagtgctggattgagtatccaacagaagtcaagtgccagagaccagtcagattgaaatagactctaactgatgattagtagagtttcagtgggaaagtcagagttctattcattttgattgttttattaagtgtgaaatagctaagcatccttttttattgatcagacataatgtaactgttctaaaggattgtttctttgatatacctggattgtgcttcctaaagggaaaaagactggatccatgattttattttccagactaccaactcctgatacatgaaaattgctctataaaataatctctttctcttagttgtttgtgatttaatatagtttagcatgttggaattaccaattgttccctatctctgtctttgactaattgccagaagtttcatttaatagtatatgatacctactattatgtgttatataggtatatcatacatatatagagagagagcatgcatatatgtacatgcagtttgaaatgcagcagagtggtcgagcgcggtggctcatgcctgtaatcccagcactttgggaggccgaggtgggcggatcacgaggtcaggagatcgagaccatcctggccaacatgttgtaaccccatctctactaaaatacaaagaattagccaggcatggtgatgtgcacctgtagtctcacctacttggaaggctgaggcggggaatggcttgaacctgggaggcagtgattgcagtgagctgagatcatgccactgcactccagcctggtgacagagcgagactccatctcaaaaaaaaaaaaaaaaaaaaaaaaatacagcagagtatgcagaagccctgttatctccaagaagtatccagctgatgtggggctgcacacaaatgacttttgcatggacaggatatctggtctaactactctaaaaaattgcataaccctatagggagccagagctaactaatgcagtaattacctaggagtagagccaacatcctgcaattatattagaacaaacgtgctacagtgtttctgtttatatatgtctcttggcatcttgaattaatattttatcatatttcattaagaaaaaatcagagatcagagaagtcatggaaacaagatcactagaattacctgttgtgtagggttagaaaatttctatgaaacttctcccatcttgacaaaatcatttaacactactgaaaacaattgatgtttacctcatagttaagtagaggcaagcatttccttgaggtctgtgcgttagaaaaccatgagcgtattagatattatctttagctactcagttttttcttttgttttcaaagtatgccaatattgttaatatgtactttttatgtggttgaccagtctgtatgtgtgtgtatctatgtctatgtaaaatgccattttcaacagtttaattatattacttaaatccctttcggtggggggtgctgaatacagagtatatcaacaaagtcaagatctacacgttgataaatcttaattgaaagctctttcttcagcagattgctgtgtattttatacattatatgttgacaacgtaacatttaaatttttgcttaataagaaaacaatgagggagagttaagctttttttttttcttttttccttttagccctgaaggactcaccagtgttattttgattgtctgggaaaattagttgttttgagttatagatctcgttctgaaaaagaagaattgctgaacttggtagatggttgccaaggggcatgctgaagccaactgagaaagggcttctttgaaaggcaaatttctgatggattccaggccaggctaatgaaggaaactctgaagctctatgtgtcttggagtagtgggaaaggagtaacagatttttcagagaaagattttgcaacccagagtcaggagtgctgctgctgtgtgttgtgcatctgctatcaaggactgcctagtcgcctctttttctatctgagagctgcacaggagtgcttttgcactgtccctgaatcgtgagtgttctgggagaggcaaagctagttccaagaatcagcattaccttgtggctttcacttttagagggtctggagatagctgacacccttgactgaagcatcactaagacacatcctggcgtcaggcagcacagtcgccttcttacacatgtatgcttccttttttcctgtagcaagggatagaacaagatctcacctgaactggagcacaaagctataaactgacttttgctacctttggaatacaatcactggagttgattttaatttctaaactggatataacaagaaaagcaattttctaaattccccatatttaaaaatctgtaccatttctctgtttcccagaagtacaaatccattgagaaacctttgttgctgggcaatatttgaggcctattgcatgcagagttattatcatttagtgttaaattctttaaatattttttctagattacctcttttggaggataataatcagataatccttctataatcctcctaaaatttagcctaatattgggtaatctacaaatgccaatagactgctttaccactgaattgatttcttttatggcaagtgtctgactgcaaaagctttatttgtatattgcctcttttatttacctcccctccttcatccttcacaatgaattgcttaatgtattggtaatcagactccttgacaaaacatgcactttgaaagctgcaggctggttctatgggctacaaacaaagagtcctactattaggatcttttcaatgtctttaccttgatttagaaccttggtactcagagtatagcatgtggacagcagggcatcacctgcaagcttattagaaatacaaaatcttgcccttcctcctcatcactgatttagatggcttttcggagaggtcaggtgattatgaatctctaataaaggttttaaactactgcaatagaacctcagagggttaacctacaataccatcaaataccattcagaatgagcttggcagtcctggtggaatttggggattattctattcctactctgcattgctttacttggaaaaaggggactggatttttctatgaaaagaatgagcttcccgtgctcctgtaaagacaccttgtagtctatgtctagaaagcattccttaattttcttcaatctgtttggaatatcatataaataaaaatttgtatgttttctttgtaactctggaaatgctagagaaaataagttttcaaatggttgttgaatcaccatggttgtcataattacttacccaataaatagtggaaatcatcatcgacaccatccttttattttccttttcctcatcgttttctcctcatcactatcctaacagttagtctctgtcattgtgttaatattttatttttcaaagtactgttgagacctaaattgttgctgattgtttcatttttgatcagttatgtgttctgtattcagatgcattaactatattttctttttttattttatgtgtatgtatatatatattatatatatataatatatatatatataaaatatatatatatatatatatatttttttttttgagacagagtctcactctgtctctgaggctagagtgcagtggcccaatctcgctcgctgcaacctctgcctcccgggttcaagcaattctcctgcctcagcctcacaaatagctgggactacaggtgtccgccaccacgcccagctaatttttatttttagtagagacagggtttcaccatattggccaggctggtctcgaactcctaaccttgtgatccgcccaccttggcctcccaaagtgctgggattacacacatgagccaccgcacctggcctatatatattttttgagacggagttttgctctgtcacccaggctggagtgcagtggtgcaagctcggctcactgcaacctccacctctcggttcaagcaattctctgcctcagcctcccaagtcactgggattacaggtgcgtgccaccatgcccagctaattttttgtgtttttagtagagacggggttttactatcttggtcaggctgatcttgaactcctgacctggtgatccacccgccttggcctcccaaagtgttgggattacaggtgtgagccaccgcacctggccactctattttctttatgggaataaatacaagataatagctaaatatttcatctttttctaggattaaagtgaggcttcttcaccttagggagtagcagaaagatgatatctgagagcccacataaacctagaaaaccattgtaaatgatattgtcgccagtgagagaagagccaatggggtgaaaatattaatagattatgtctacaaatttgaaatgttaccattgaaataaatgaatcaggctcacttgactaagaaaaaaggaaaagctttataatttgaatgctttcaaatagaatagtgtgtttataatcaatagcatgttttctttttaaaatttcctatattttatttgaagtcatcatgaaatgtaaatggaatagaaaatttccttttggaaatagcagaatgttctctttttttcaacttttgagttctgaggtacgtgtacaggatgtgcaggtttgttacataggtaaatgtgtgccctgttggtttgctgcacagatcaacccatcacccagatattaggcccagcatccattggctattctctctgatgctctccctccccctggccccagcaacaggccccagtgtgtgttgttcccctctatgcatccatgtgttctcatcattcagctcccacttgtaagtgagaacatgtgatgtttggttttctgttcctgcatcaatttcttaggttgctagccacctagtttgctgaggataacggcttgtggtccatccatgtccctacagaggacattatctcattcctttttatggctgcatagtattccatggtatatatgtaccatattttctttatccagtctattgatgagcatttgagttgattccatgtctttgctattttgaatggtgctgcaataagcatacaaatgcatgtgtctttataacagaattatttataatcctttgggtatatacccagtaatgggattgctgggtcaaatgatatttctgcctctagctctttgaagaatcgccacactgtcttccacaatggttgaactaatttacactcccatcaatggcgtaaaaacattccttttgctctgcaaccttgccagcatctgttgtttcttgactttttaataatcaccattctgactggcatgagatggtatctcattgtggtttttatttgcatttctgtaatgatcagtgatgttgagcttttttcatctatttgttggcctcatgtatatcttcttttgaaaagtgtctattcatgtcctttgcccactttttaatggggttgtttttttcttgtaaatttgtttaagttcctcgtagactctggatatgagatctttgtcagatggataggttgcaaaaatgttttcccattctgtaggttgtctgttcattagcagagtgttctttataaaaataagacaaattgtatgtcattttttaagagagaactaatattaaataccatttattctaatcatggcacatgttttgcttcttcttcatgaaactcctgtgaggcagattgtgttatttatattttaaagataagaagatagactcattgataaatggaaactttattcaagatctgtgcttattatacttagatattgactgttaaaaaggacatatagattggaaacaatttgttgagcctgattagttattatacagaatatattttaatgtgtttaggtatctagttgggggcctatatgtccagtttcaaagttaaatggtgataaccctgaatatttgtgaactctagttttatatcctcagtagagcttcacatattttatagttgctcaagaaacatgtgtggaatacatgctgaatgagccacacactcctccaaccgcctgagaagggggaagagcttctcagcacaatggtcaccacaaggtgggccacttctcccacttttctttttctaagtggcatcagcatgtatttggtcacctgcagagaatagctgaattgcaaactcagtttcccatcgttattttctgttcacaattttggggcttaatgatctttcagactatttgaacatgttcaattttgtttacaaaacccacaaagcatttttcaagctgagtcaactatcaaagaagaaaagactcggtcatctagtggatcttctctgggtggattggttccatctaccgaatgggatatgaggaggcaaaccttaccctcccatttctccataaaccagagtcgaaaattaggttgtgtgtttccagtctatttttatgagttcccatcataagtcacaccatccatcatagcataagcatttgaccctcattatgagacatcaagaaagctgtcaccattgccctagcaccagtgtctccagtaaatattggaaatgttaggagatctcatttagtaaattcctgagtgttgcctgccagcgcattgggtcttagtgttttatgaattattctttagtctatgtacttttatcacacttgacagttatcataaatggtctttaggctgaatactagtttttaacaaaggaaaatactcaacattattaagaaggacctgcctggatctgctatagggatgcagaatatagaaattaaaaatatttgagatcgatgtctgtgcaacatatgaaatcatgtaaacagatacaatcaataatttctcttcagttctaacagagccccataaaaacgatttggttcagtttgggctacctgggatggctaaaaaataaaaatgttttctgtagacttagaaccaatctggagatgaggacacttaaaagttcttgtcttctgagggattgtcagacaggtggtgtgtttaacatcagggtgtcatacaaaggcattttcttagatgggctttagcctaatgaccatgactgcctaacagtcactactggtatctggcaggcaattgaggtatttttcaaaggcccacagggtatgtatcattatactgagtgttttatgcagaaaaccctttgaggcatttttttaaatcagttttttttaatcagcttttagttccatctgttcaagaataggtaaactgaatctctttggttcctttgttttttatttagggaagttatctgttcaattgagatgaatggtaatgggattatattactgtaattcatttattaaaggagtattagaatccatagtagtatgtttccatctcagaacccacaaattaccaattaaacacaatcttccaaaacaatgtgattattttcatttaagcctattttggaagctgagtcacttgccacctgcatatatctttgtttaaaaagcattagtggaatattactgaagccgaagccattacttggttgtgatttacacagggaaatggtgatagctgttcatccagactgcagcccagtcactttcgagatagcctgtctgcatgttggctagttgtagcaagttttaaaagcaaaacactcaaattataccacgttgaaaacatgaagaggtgtttttattttttaaaaagaacgaagagatggcaaactaacctataaattaaaagaagcccaaactgctgtagatgaggatgctgctttctttgatttaacagtattaacagagcactattctatatgcagcgccatttcataccctttgggtattttagcaatttgaaatcacatcccttccctcaagcagaatgcaaggtaactggagacataaaatgagcacacatgtaaaaccaaatagcgatacaaggcaaccctaccagaggcatacgaccagacagtgcatggtgcaatgccagaagttgacactgtcattgggtgctgtggatttatggcaaagggctcactatggatttgagaagccagaaaagtccttagagaggaggtgaaatttgagctgattcttgaggaatgtatgagaactgttaagaccccagcattccaactgggagggatcattggtgaagtgtcaagatgtccatggcaggggtgcaggagagaggtgagcagcaggagaataatgagggggctgagatcagaagagtggaagtagaatggcaggcaaggcacaagcaccagttttgcagggaggagagaagggtagaggtattgaaaaacctatgcttttctagaaatctatgtggaaatagctactaaacatttgtggatgtgtattgagatttatcaacaataaggctgaggataccaggcttgaagtgttcccaacagagaatattgggtggcaagtgacagtgatgcagagtaagatatgcagtagaccaagatctggcagagaagacaagagagcaaacagaggagaaagggagagagggagggaactgtgttgcacaagccaaaggaacagatgaggccttgaagttgacatcaaatgggacataaatgtgttagaaggtgtgaagagtgactcatccctataatcctggtactttgggaggccaagccaggcagatctcttgagctcaggaatttgagaccagtcttggcaacatggtgaaaccccatctgtacaaaaatacaataattagatggatgtggttgtgtgcttctgtagttccagctactcgggaggctcaggtgggaggatcatttgaacctgggaggtcaaggctgctagtaaccaagattgtgccactgtactccagcctgggcaacagaatgagaccctgtctcaaaaaaaaaaaaaaaaaaaatgtatggagggaccaagatgaggaggcctgagaaaagttcattttcatgacagtagaaatctcttgagaatccaataaaatggtaagaaaaacaaacaaaagataggataggagagactaactaggtattttatgaaacataaggctggtaaattgtatataagctaaagaattatagatgaaacttttgataatagactgtttatccctagataaccaaggccagatgaggaatattatgtgcagtgccagggtgagataagtagagagataagtagaggtgctattgctggactcccagagctcaatgccttatgcttctggtgttgttctctcattgtggggaaactgagtaagccgtgcgtctttttcattttgcctcccagttactctagattggttttctagatccattaactcttaagggtcattccagtccagctctgagcacatcaaatctattgcttctcatcctttacaccaataagcttgactccttctaaaggtcttctctgctcttcatgatctcgattcttcctgcattcctaagaatgaaagacacaaatagcttttatagagaatgccctgtgatagataaagcagttgtctctctactatatataaaagggatgctgatatttgccatcttcctcaatgagcaggaccagttacatttgcagggcccaatgcaaaatggaatgtggacccattattctcaatttattaagaatgaagccaacaacaacagaacaataaaccaaacaaagtagggggtcctctttgtgcattacccatgaagccagccctggctccagaactgttcaagtccagctagatggcagtgccattctgccattataagaagcagcatgatctaaaggaatattacagatgtttaaacaaaaaattgaatatgtgctgagtaaaattcatttatgatgttaaatgatttccaacagtcagcaggcatggctgtgtatacctctgatagtcattcacagtgtcaaactacttaggcttactttttacatccagttcaccactgaaccttcaactgattcaaggctggtgaagagaaaactgaagatgttaggactcttccagagtaacatacggaaagtttcttttccgtgaaataacaaactggttttctaatagctgtattctttccaactggaagcattctaatcagttacccagaattgctgattctaaatccatctgaattatataatgtgtttctccttctatagaaagaggtatacagtgtttttttctggaaagttaattttacttttggcatatgttctctgggactatcggttttattgcaactggatgcagaatttaccatgtctgctttgccttctccgccttctccgcatgccagcaggagcactcaccacactgcaatccatctggcccctggctggcagtctaggcacagtgtcaatgctgtggtggccctagtgtgtacaggaaggtatgctttggttcagaactgcatacatagtaggcattttataaatacttactgaatgaataaatagaagatgacaaggcatggaacagcataatggtcttgggaatgcttgtgttttcctaatatatccagaaggagaaaataattttcagcccctagtcaagaagtttcatttgcctccacattcaagggtgggagtatctcagttgatgaaatatatgcttctgaccaaaacatgtatacattgaatatatattaaatttattgggtaattatttaaaggaacagtatgttaatggattttccttgttttgggtaccatcattgatttccacctccccccaccacatccccttatagtctttgtctgaggatttcactataaatgaaattagctgaagaaaaccaggagaaaaccaggacacatgcacaacggtaagtgtcacaaagtgacaactgagctagatgtacacatggcctaaggcctgctagccacagggaggcagggatgtcccctcttgctcagcctcccatcctgtgttccctcactcatttttattaagtgatagcacgtttcactgcagctactacagcatctttgctgtctggagggtattgttttggatgcggatgttgtttaggatttaaaacaactgtgacattgatccttttcaacaggcaagagataatatctcttgccatcatccactgcctccatgaggatattctaggaatctgtatctaattacctgtgcagctaattaccacttccatgttaagcagcagcagtaatctctttttcctttcaagtccattttatggcatcaaactgtattatattctcttttcaatggctgctgacaaaattacaacagcaccacccaggacccgatatggaatctgcctgcccgtgattcaactgcacgctgtgtgttttctcttaagtccttttcttttttttttttttttaaccttgtgctattaaatacctatacatcggaatcatctccccatagctccatttgtttgattagcattacgatactgtgacaagacactatatcagtagtaatcgatctgattagcatggagatgatatgaacacagattgtattgatgtttaatagtgaaggcatccaggtgctgtaaacattatagatgtttttgtatgctgcgtgcaaggtctctgtattgaagacggcaaccgcagcagattttagagctcgatgatttattttatgccaagtgccacagtgggtcttgcatagtgtatggcattcctttgctttatcttgcacaaaatgttttaatcagtgttcaaaataatgcaaatattttcactggagagattctaatattgctttattaagagatgcttgcaatactgcagtaaaaagcttactgcagtctcattgaaaaccagccacattcttctctgaactcttgtctcttcccttactcttgtcaccattatacctggagagctaccatttgccagctaatattcagccccagatgttccccctggacaatttttctgaatttgcctatcctttggctctcagtagttaggagtattttcccctgggcagttctagagctttgtgctcctgttctggtacccctggctctgtgtttatgcatccatgcctctttactttgtaattaggatgccccgaaggtagtcattgaaaattaccatgtctttgtacatggcaaccagtggaatgcttagcattgattattcatttatttatttaacacatatgtattgagtgcttcatgacgcttatattctgctgagagggagagagacaatataacattataacacaggtaatgataagtagatagggggagccagaggggacaaggtgaaatggagaatactgtcttatttgtagagaagaggaagagcttacattgctatgaaggtgcaatcaaggtggggagagagcaatgagtgtgaaagccatagtctggagtgtgcttaggctcttccagcaggagcaaaggaacacctgtgcctggaggtgactgtggagagagttggaggtgaagcttgacaggtgcagtgggtggaggaagatcttattgtgggccacattgaggatgttgactttgacttggagtgaattgggcactcattagcttagaccagaggatttactttgaataatatgaaacagtctcaataactgatctattcagtatggtagccgctagtcatgtgtggctgttgaatacttgtgatgtggctaccttgaattgagatgtgctatatgtaaaacacacatggattttgaagatgtcgtatgaaaactaagaaaagtgaaatcatctgatatataattacagtaataggatcactagctgctgtactgagaaaagatataggggtggaagtgtcaaatggtttggatcagggtgatgtcagtggagatgaagagatgtggtcagattctgggtgtattgtgaaggcagcctcaaaaagattcattgatggattagatgtggggaaacaaaaggaagtctaagagtcttttctgtgcaactacaagaagggagtccttttcttgagatgagaaagactggttgaaagatctgggctggggaaagggagaatcagtaagttgttagtgtatgtgttaagttagagataacaattacaaatctagacaaaagatgatttgacagttataaaagactggagtttatagaaatggctcatatggagaaataaatgtgggtgtctcagcatggaagtggtttttgaatcataaaactggatgagaccacttagggagtgaatgtaggtctgtgacttagcccaggacattccagtatctatgtgtcagagaaaggttgggaaaatgcaagaactggcaagggaggagaaccagaggagggtggtgtctaagcacccaaatgaagaaagtatttcaagaagaagggaatgatcagctgtaagatgagtaagatgaggactctgaaaaatggtaatttgatttgacaagttggaggtcactgatcattcccaggagagctatttcattgaaatggggagtatgaaagtggaggcagtgagtggagccagtgcttttaaggtgttatgctttaaagtttaacaaagaaatgagaaagtgcttggaggagaatatagagtcagatgagggatttttatgagatgaccacaagtataactaaataaatggtttttttttgcatgatagattaataaataagcaaatgcatgtatttaaagattctaaagctgtgctgtccaaaagaaattgcatgttagccatatatgtaattttaaatattttagtagcctcattcaaatgtgaaaagatacagcacaaattaattttaatagcatagtttatttaactcagtatatccacaaacttgaatatataatggaaaagttatggaaataaggcatgttttgtctcatagtaagtcttgaaaacccatgtgtattttatgtatagcacatctcagtttggggtagccacatcacaagtgttcaacagccacatgtggctagtggctaccatactgaatagctcagttcttaagactgtgccttatgaatagaaaagagctgttgttgaaagtaaagcagaataacttttattatattattaattcaaagtatatattcataaaagtttatgcaaaatgaatgagaaattaattaaggctctgtaatttgttccatttatgtgattacataagtaaatctattttatatagaaaatatgactgtgtccctttcaaagacactaagaccttatcttaaactctattttagttaaaaaaaaaaaaagttaattgccatttcaactgtgtggtttgtagtaaaatttgaaatgggtttaatgtcatttataacatttgtaaagttttgggtgatttaaagggcattaagggtttttttgatgaattatacatgttggtattcagagattaatggtgtcctttgcaaagaatgtgtgtattctacttgaatctgttgaaattgtagtaatggaattgcatttttgcaaggctgtatgttatacagacattttctttaaacaaatagtttgaggtgaggaaaaaacagaaaaaggactataaaccagggctggaatatgttaaatctcattttttaaggaatattaacaaaacatgaaagatattatagtgacaggcatttttactttttttttttcatttcctgtcatgggcaagtcaaacatccatgccccagcttcctcattattaacaggagatatattaaatgctccttaaaatacaacacttctgtgattctctgaaatggagcttattatagtaaattgcaaatttctagtaagttataactgctgaatacaaacattttgcatctaataatgaaaatatgaaataaagaaataaacactgtaaaacccaacccccaaatgcttgaagatcactcctgggctgagttgttggtgtttcagggttggacatttaaaggggatttcatgaaaattaaatttcttgggtttgttttttcaaagttttaaaatatatgtttatagatgacatggataaaatgaactaaggtaatataaatagtgcctttcaaagagcaataaaagaatgcctttggtccataaaaggagagattatcaaaaagaataaacttgattagaagaaataaaagtagatttattttaaaagggaaaatggaatttattcctttaaaatacagaagcactaacttaaaaatgtttggactatagtaatagattttttgaaaagtagagaattaaggagaaagacctaccaaaaaaaaccccataattcaagtgtacatggagcaatgtgaagggaaggatgtgcaaatgtgcatttatgttgggaaaaatcaaggagcctgtttaaaaatagaacctacttagagacaaaaactagattaggaggcattaggttatgttagaaaagtagtttattttccttctacaagctgtatatggtttttgaatcatttttaaaaggctaatttgaaatgtgttttgcaattttaaaccaaaagctttttatgcaactttaagaaaaggatacttatcctatttttataaccatgaaatatctataactttgcattacctagccctttaaaactcagaatataatttagataatttacaaaactgatgttataacccagccaaagctagtgtttttcagttatcaggtatttaaccgatatatatctatgagatttcttaaatttatattaatttattctatgaacatttatactatcacatatttttgtaataacaagctaagaaaattattattgttgcattaaattgtttactgaacatttattgttttatgcaaataaatgttttcaaacttagtgagctcccccgccaaaaaaagaaccaatactaactgtattgtgctttatctttaggatatattatcctccttattcagattccatgtacatatgattccttatccctatttacactcacttttcctgagaactttttgactataggaactgaaagagtatgtgcatgaaagcaagcagttggaaaggacttaaaaatacttaaaagaaatagtttttagagttagatgggggtctacctgaaagcagtattgactcttattttttgtaaacaatatctgaaaaggtagacaggatataaacaaaggatagtactattgatttagctgtatagtaaatactccctttcaataaaatctgagcataaataattttctgtgacttttcttcaaccgtaagcactttggttttggaatgtacaggttctctactcagacttcccttaaaccaaagttttctgctgtgggacctctcacactgtattctctgtacttgttctgtgaaatgggattctgcaaatgctagctattattattcatcactctacttagaataattaacaaatgagataactagaggttaggttttataaaggaggatgaattagatgtcagcaaagtaaggggctttttgcattgaatcaataatgaaagtaaataaaggtaagaggaagttggtcttggcctccatgtcatgcttctgtttctgggtattatctagaggcgctgtgctgcatattgatgatgtgaagctcaagggctctggagttaagctacctgggcttgactggctgagctacctctgcccgtggtggcacctcggacatgtttatcccatccatctaaacttttattacatatatatgaaatggaggtaacgttttgaatctaccatactgtagagattgatttgagaggacaaattgaaaaggtgtatatgagtccctttattcagttcctggaacattgtaagagcttaataaatgttagcaattaaaatcatcatcagtattgctttttattatcagtacaagtactccttgtaagagagactaatgacaagactctacagtcttatcatttagaaagggagtggacaatatctatttagctaggtccagtacactaaataaaggctatctaatgctttaaccattgttaacttccttattctgagtctctaagaccaaggcagaatgtcattgtttggaggtcacagaataagaaagcctttgaacttttgtctaaaagtaaaaattgcctggtatgcatatgatcttgaacacataaaaatgattatattagtagtaaattgcatctgtacagcagagcggggttaaaaagattttagcaagtgaacaataataaaaggaaattaattgtgtgctattcttattgacttgtgtacaataataccatagatattcttattttaagtgtttttcccttatgttgttcatggaaatatttttaacaaattaatttataaggtcttcacaaaattatttataatttagctattaaatccctggtttctataagggcttagacatatcagaatattttgatttgtgagggactggtatacttgtgtctttattttataagcagtttctcatttagaccttagtaaaattgccctgaatcaatgttttagaggactaagagttggtaaaaagtcgcataaattgtgtgtagctcagtgtgtaggccgtaataaatatagaactattaaacctgtaggtactgtttttttttttttttttgagaatttaaggggattggaaaggtttactgaaaggagagaaagagcaacaatggactgtctcccaaaactctgattattttttttcttaaaccttttcatttggagataattgtagaattgcgtatggttataagtaacataggaagatcctgtgtactctttatccagttgcctctaattgtaacttataaaactgtgcaacagtgtcccaaccaggatattgacagtgatacagtcaagatacagaacagttttgtcaccacaaagattccttgttaaaattctcatgtttgatggttaagttacctcaaagggattaacttaatactgagattagttcaaagaaacaagccacaaagcaagcaagggaacattgatcattgctttctgcctcttaatcggaatgttgtggtagtcaatcaagcagcaactgtgagcagagaacaaaagactattaataaacctttaaagtaaaaaaaaaaaaaccctaaaatacctgataggccttggttgagtcaacaaacagaaggtttctgtagttaataaaggactaaatgaaaaacttcaatgaaaatcactgaccagtttggaataatgaaaagctctgaaggtggtagtaatgattggtgcacatgttataaatgtacttcacaccaatacactgtatactttaaaatggttgaaatggtaaattttatgtatattttaccataataaaaaaaaaacataaatgaacaaacaacaatgacaataaaaaccatggaccatttctttttttttatttttaatttttgtggttacataggtatatatatttatggggtacatgttatattttgatacatatgtacaaggtaaatggagtatccatcccttgtagcatttatttttttatgttacatacaatccaatagtagttattttaaaatgtataataaattattgttgattatagtcctcctgttgtgctatcaaatactagatctcattcattctatgtacttatatttttgtacctattaaccatccacacttcccccatccacctctagttttattccattgtggtcagggaagatatttaatacaatttcaattttttttgaattcttaaagacttgttttgtggcctaacatatgatctattcctgagaatgatccatgtgctgaggaaaagagtgtgtattgtgcagacattgggtgaaacgttctgtaaatatctattaggtacatttggtctgtagtgaagattaactccagtatttctttgttgatgttctctctggatgatctgtctcaagctgaaagtggggttttcaagtcagtagctattattgtaatgggggctctctctctctttgtatctaataatatttgctttatatttctgggtgctttgtgttggatgcatatatatttacaattgttatgttctcttgccgaattgacctctttatcattatataatgacctttgtctctttttatggtttttgtcttgaaatctatttcaagtctgatataagtatagctactcctgctcatttttgtcttccataggcatgaactatctttttccatccctttattttcagtttttgtgtgtctttacaggtgaagtctgcttcttgtaggcaacggaatattaggttttttttttttaatctatgtcttttgattggagaatttagcccatttacattcagtgttatcattgataaataaagacttaatcttgccattttgttatttgttttttagttgccttttggtcttctcttctcccttccctcccttccctcccttccctcccctccttccctcctctccttccctccctccctccctccctcccttccttccttccttccttcctgtcttccttcctgtcttccttccttgctgtcttcctttcagtgtaggtggttttctctgctgcgctgttttaatttcttgctttatattgttcgtgagtctgttgtatgttttctgatttgaggttgccatgaggcttgcaaataatctctaataacccattattttaaactgatgacagcttaccactgattgcgtaagcatacaagcaaggaaaaaaaactaaaaaaactctacactttaactttgtcccttcattattaatattttgttgtttctatttgtatcttactgttatgtcttgaaaagttgttgttattatttttaataggttcatcttttagtttttctacttaagatacaggtaggtcacacaacataattacagtaatataatattctgtgtttttcagtgtattaccagtgcattttataccttcagataattttttattactcatcaacatccttctctttcagcttgaagaactccctttagtgtttcttgtaggacagggtctgctgttgatgaaattcctcagtttttgtctagggaagtatttcttcttgattgaaggataattttgctggatatactatcctttgataaaagttttttttttttctttttcttcagcagttaaaacatgtcttgccactctctcccgacctatcaggtttccactgagaagtctactgccagacctattggacttcgtttgtgtattatttcctttcacttgatgcttttgggatcccctctttatccttgacctttgggagtttgattgttaaatgcctttaggtagtcttatttgggctaaatccgcctggtgtttcataaccttcttatgcttgaatattgttgtctttctttaggtttgggaaattctctgttggtttcactttgaataaattttctatccctatctctctctttacatcctctttaaggccaataactcttagatttgcccttttgagggtattttctagatcctgtaggtgtacttcattgttctttattcatttttcttttgtcttctgactgtgtattttcaaatagcctgtcttcaagctcactaattatttctctgcttgatcagttctgctcttaggagacaccgacacagtcttcagtatgtcagttgcatttttctactccacaatttctgcttaattcttttaaattatttcaatctctttgttaaatttatctgacaggtttttgaattccttctctgtgttatcttgaatttcattgagtttcctcaaaacagctattttgatatctgtctgaaaggtcataaatcttttaaaaggtctctccgggatttgtctttggtgccttacttgtttgttttgtgaggtcatattttcctggaccttctttatgctcgtggatgtttgtcattgtctgggcattgatggcttaggtatttattgtagtctttgcagtctgcttgtttgtacttgcccttcttcagaaggctttccaggtatttgaagggacttagatgttgtaatctaagtttttggtcactgcagccacatctgcattacctaaaagtaacactgtgacttttgcagacttttacaggtaccatcttggaggtcttggataagatctggaagagttctgtggattaccaggcagggactctttctcttcccttattttctcccaaacaattggagtctttctgtctctgctgagcttcctggagctggggggaggggtgacacaaggacccttgtggccatcattactgggattactgggactgcgctgggtcttgcccaagacctgtgataaccactgcctagctagtgcctatgtttgctcaaggccctgagactgcagtcatcaggtggcagccagccaggcttgtgtccttcccttcagggcagtgatttccccttggtcccaggtggatccagagaaccagtcaggagccagggcctggagtcagaaaccttagaaatctacctggggctctattctatggcagctgcactggtactgaagccacaagacaaagtcctttcctctcttccttctctttccaaaggtaaagtcgtctctccctgaggccaccactgcctgaggcctgtactacctggctactgctggtgttcattcaagacccaagggctcttcagtcagcttatggtaaatgctaccaggcctgggactctccctttagggcagagggctcccctctggtatggagccggtccagaaatgccatccaagtgccaaggcctggaatcagggaaccctagaatctacttggtgctctaccacactgtggcagagcttgtatctaaggtgcaagacaaagtcccctttgctattccctctccttgtctcaagcagaaggagtctcttgctgtagccatcacagctgggaatgtgctgggtcacacctgaagccagcatgtctctgagtctcactcaagggccacagtgagaacggcctgggtactgctgctgattattcagatcccaagggctctttagtcagcaggtgatgaatccttccaggactgggtttttcccttcaaggcaggtggtttcccttctggctcagggtgtgcctggaaatgttgtttagaagctatgccctggagtgggggtctcaggagtctgcctagtgccctattctactgtggttgagctggtatcccagttgcaagacaatgtcctctctactcttcccctcctctcctcaagcagtagggaggaacctcccggagctgcactgcctggggttggtggggtggtggtgcaagtactcccttgctgcctggctgcatggaccgtttcttgtccttcaacttcaattcagaagctgtattttagataataacttttctttcaaaattatcagttaatgttttacatagaaaaggctgttttcttttaaggagctgttggaaatttaaggtttgcttcaagtggttctggaaattaattggtctttgttctctactcacgattttaggggttaaagttgagactcgagattaaaatatgggttataagcatgagtgtgatcgcttctgaatagctagacgtttttaagttgtataaagaatgagtttcagccaggcgcggtggctcaggcctgttatcccagcactttgggaggccgaagcgggcggatcacgaggtcaggagatcgagaccatcctggctaacacggtgagaccccgtctctgctaaaaatacaaaacattagccgggcgtggtggcgggcgcctgcagtcccagctgctcgggaggctgaggcaggagaatggcgtgaacccgggaggcggagcttgcagtgagccgagatcgcgccactgcactccagcctgggcgacagagcaagactctgtctcaaaaaaaaaaaaaaaaaaaaaaaagaatgagtttctgtttgttcctagagttatctcctaagcatttctttaaaggaaatgtcctattttttttctttctcttttagaaactttaatgagttcatttcatcccttcctagtatatttggacaaaatgaagttatcttgccagcaatggctcctgaattctatgtcctcttcttcagtgcatctagttttatgggtacgactggtcagtgaattgctggtcactgcctaaatgtcctggaaatggtaggtggtgatgacacaaagaacatgccaagatatcctgtggctgtagcaagagtttcagagagaaaactcaaggagtgaactgtgtttgggttgttgaggtaattgagtgagaggaaaagatttacatttctatcatacaagccagagaagccattttcccatgtaggcctttatggtacttctagttttaagtgggtacttacattttaaaatgagaaaggttgccattctcttagcttaccttgtagggcagaaaacatactaggattatgagagatggaatagaattttgaatttcaaaccaattaggaacagcttgaataaaatagaactttcttatgactcagagtgaaagaccatgcaagggctaacatttgacatttcagcagcaagcttttagagacattgtgttatgtatttgaatttcttcttctctgtggggagtaaggccttaggacatgccatttaattacatgtttaatgtgttttgttttatattaccacaaattggctaaaaccattataatgtgctaaaacttatccatctcttcaaaatctaaccatgttgtttatattgataacttcttgatattatgaatcccacaagccaagaatacttacatgttgcaagagaaaccttcctaatttgttcacaaattttctgttttttaatttcctgaaaaatttcctcattctctttttatcgatctggaataaaatgaagaattaatatgattgagactatcttcatctcttcctctctaccttttcattaaaaggcaatcattgcagtgtccttttatatgtaaattttatttttgcctctaactatcatttagctttgtagaagctaaagctttaaaatggcaaatagaggaaatttacagagatgtattttcagtttctatagaaccttcttaaaattagatgaccaacctctactcaatgctgagattattcattatgctgtcaatgtataattatctgtcggtctactatttgtaatttctctgtgctgagatatcccgtttgctattgaatgctacttgaaagaaaattattgatctataccacacataagagttttgaaatcttcccatcagagtatattgcacctttagcataaaaaaggctctgatttattttactttatttttttgcaaatagctgctttatagttctttaagttcaattcaatattactctttgttaaactttaaaaaagtcttcattactttcctttgttaaaccatttctgcattcttcagataatccaggatggtttcagtaattaaaataatttagcttcatcactgttcaacataatcactgttaagcatgttaattcagatactgatccttaacatttttgactgttatgatggaggcctggccacagacgtaccttgtgcatgtttttaaaaaacctaacctgttaataatctactccaggttctaccagtaacccaggggatatttgttttcttttgtggcttcttccaaggaatcatatcaaattcctttggaaaacttgtattatttgcatccatcgtctacccttctattttataccccctaaatatttatatctactatgtacctacaaaaattaaaaatgaaaaaaattaaaatttaattttaaacatcttgtagttgagaagcaagtcgtccaatatcagattatacttatatatacattatagttatggcaatgcctttaatttcaatgcttttttttttagaaattctgaactatccatgaaagattttgttttttataattttccattaagagtgggatgttaaatatgttctctactttttattttaaaaaggacatcactacatgtcgtgatagtttatgtttcatgtgcatttatgttcttcacctttatgttattcagaatttatttttggtccacatatgtgatgttaaaatcttaagatttttaaagtttacaatatgtagaatgtaggtgtgttactgaatcactgttgtactgcatttgacagcttatgtatttctaataaaattaaagacttgggaaggaagcatagaggatcaagaagagactaggctttggaataagataaatttgggattgaatcctggcttattttctttttctgagctctgggaaaaatcacaaactctaaattgctggattgttctaagaattaacagagataacatggagagatccctaatatatagcagtacttaagtgtttcccctacctccttcaaggtcaactaagtgaaagaaaaggtaaatatcagaaagaggcatcttggagcagtgccccgggatgtgatgttatcagcaggagttaccaaactgtgtagcagaatggaccacttggtggtgtttgggacctggcatggtgggagaggagaggagaaccagagagcagggcttcagaccaccccttccctggtctccagtggtatagtgtgctgtctctcatttttctttaaatgtgttaaataaattgtggtttattctgataattctttgaaagaaaaatggctttatcatttaaagggaagatagtcaagtggccaaatataaatatactctggatcactaaatgtaaccggttttaaaactttgtgtaggatgtattaatacttaaaaaaatgatgagtttttccctcttgagtttttccctctggaatgaccttcaaaagagactcaaatctctgctgtaggtgagggactgaccaagtgggtgggcacagtggcaaaatattggtagacaaagtgaacagaggaagagtgggggttaaattagattttactaggcagctgccctctccttcctacttaatgtgctcaagaggaatgaagccaacataccacttaaaagggttagtcgggggaaaatgactcttgaggaccagtagcaaaccagttagaaaccagtggtttctaacacctgaaaacattcctagaaatgaaaagcagttaagtcagtggaaagagaaaggagagtaacacgtctaagactaagatgttcttggggttaatctaggaagttgaaaatccggatttggaaggcaaagggaacaggacaacaagggtagttgtagccattactttattttgggctagagtaatttttgctaaataatggcttattaaagggttcctgatggtagtttgtgattgatgtagtgccaactcttatttctcatctggactgggtagctggttaaataatttttctgtgacttaagtaattatttagaagtcatggtaactatttgtcaaaaagtaaaatgaacccagctctctctgtatgagattctggagtaggtgtctccttcagaatgcaacccatttagactcagacttttcttgctttgaaataccataataactctgtcatcacataaacagtgaaaattgtagttagaatgctaaagcccattttccccctttgttttctcttttcattggtgtgtgtgtgtgtatgtataaatgaatgaatatgggaagagagaattctcctcccgtgccagttatatatatgggcagtagaccttattattaactagagaacacatggtgtttggactgttattgttaatcatttcttttgctcagtgtggtatccaagctataattttgatgccttcccttatgttggtaatttagcaaccattgttctgtttgataaccacagcttgacagatatattagcagcctaactaatatttgtaaaaagagtgagttcaaaatttgtttttacatttagcctgacttccagccatggagaaaactttctttgtaatgtggtcaccaggttgtgtttttttcaggcttaattttatgttaaacattttacattggattatttcatctgcgtggttttgtacaccatttgaattgggatgcttatggtgatatcttggagaatgtatgctatttgcagataatgaagattgctgggaaattttagcatttttgtggagaattgggtgtattaaaaagtagaagcaaagatgctgatttttaagtggaaaacatgaaagcttttttttttcttttcagactgagtcttgctctgtcgcccaggctggagttcagtggcacgatctcggctcactgtaacctccacctcccgggttgtagcaattctcctgcctcagcctcccaagtagctgggattacaggtgcccaccaccacacccggctcttttttcatatttttagtaaagacggggtttcaccgtgttatccaggatggtcttgatcttctgaccttgttatccacccacctcggcctcccaaagtgctgggattaccatgaaagcttttatttagcaactgggaaagtacctgtggaggacaatgactagggctgtgacagatgatgtgaatccatagggccatgcttctaggtcttgtctttgaaagttgtaaattttagtacaccttcatttacatttctatttgaatgtaaattatattatgtgataaaattcctctggaggaaaattcccaatgcagctaatttctctggagccccctgctactaatgcagaataaattattcttttcagggaatttcactgtgtcactctgggtggtaatgcaaggcacattgggggctcagccaaagccttagtttcatggaattcggagtttgatcagtgtttggtcataaaattgtgtctctttatagatattataagactttcttgacatgttacttcatgggcttgtttctataaagagtggtttttttgtcttgttttgttttgtttttgacacagagtctcactctgtcacccaggctagagtacagtgttgcaatcttggctcactgcaacctccgcctcccagggtcaagcaattcccctgcctccaactcctgagtagctgggactacaggtgtgtggtagcacgcccagctgatttttgtattttttgtagagataagctttcattatgttggccaggctggtctcaaactcctggcctcaagtgacctgcctgcctcagcctcccaaagtgctggaattgcgggcatgagccaccgcacccagcctaaagagtgttttttaagttcccttctaactatttttaacacccattggattcactacaaattacattgttaccagcctctctatcataataatgaattttctaagccccttggtgctatcctataccaaatgggtgtaaactgatataatatcttctatctttgaacttgtaatataagagaataatgataatgaaggaaatagtaagataatccaaaaatatgaacacacgttaataattcttaataattgaatcataaaaattttcagctaaaaggaaatctaaatatacttaaatataattatcacatatcgaagatgaaattgaatcccatataaatgagttgtccaaattcatgcaaaaaggaagtggaagaaattgaacccaaataccacatttatttcttgaccattgtttttgtcatcaggcttagtgaaatgttagcaatatctttaaaactcttctaccaactgggaatatttttttaagtggtatctggagttgcacattgggggaaatcactactatacttttctttgtatgaaaacaagtgacttagcatttgcttaatgctctacaaaaaacaaaagtctatgagatacaaaagaatacacgagactgaaatggagcgtcgaaatggaaataatgttgtactggagcctagactctgttgggcttactgtcatccttgcataattttagaatcctctgtgaaccaagtgaattagtagtatctaaaaagaattgatgcccagtagtagatactaaagacccaaaaagattaaccagaataacgtttatgtaaaaagaagagatgtttactttttctgtagttctgttagattacttgaccaaggggtttccataaatatagtgaatttgacttgggtaaaatgtattaaaaataaataacaaatagctttcatgagaccttaaggcccatataaaggcataagtctcagtgataaaaacattgagtggtttcatactatcaatagtgtccttcagcagaattgctttttattgtttgtaactcagccaaaagggaagttattaccaggagtttagggatcttaagcatctgcaggagggttcagaggttatgcagtaaggaaccatgcagatcatcaaccttaaaaaaataaggccatcgtcatacacttttgtcaagatattaaatttgtacaaatatttgggaaagtaatttggctataaaattgaaaatgcacataatgttacagaaattacatggttaggtaggcatccattctgtggaaatgaaagacaaaatttaaaaacagatgcacacacacatacagatgtttattgcagcatcatttgttaatggttcaaaaaaaggcaacataaatgcccattcatatcatgcatataaattattggtaatatatgctacatatttactattcatccttgtcaaaaaatatttgtgcattaattttggaagatggccatcataaatatagataaatataaagttcaatgttaataagtacagattctgaagctggattacttggatttgtgtgaaagttttcctacttcttagctctgtgaacctaaaagtgttctacttgtcttgaatttggtgttctcacttgtaaaatgaagataatcatagtacctaccagtaagcttatataatcagttgttaatactgattaacagggttggcatggggtcattgatgagtggagcacagagtttcggaaggaagtctcacttagtttgtataaatggtaggaatatgggtgattgacttttgaaatcatcatttttgttgcacagtatttcagtgcatgaatctgccataattaatacaatatttcctttattgctatgcttagattttttcgaactatttttctcatggaagagaaaggaagtcattccaaatagaagattcagcataaataatgtgtagagtcagggatgatcatgagctctttcattgctggagatgatgtatgacaggattgtgtgtataagctgtttagatgattagatgatgagtaaagaagagtattggtggacctccaatattgagcttagaagatgttccgagtaaaatgtctttggaaggaagcagagaattgaaagatatgattggacaaaggaaatgtgtaatagtgatccaggatgaagagaaagcagttggcaaataagtaagaggttagaaagagaagcaagtttcctaggatttgaaaatttcataaaagaggtttagaattttgattctcttccttgtgtaatgaatgggtagctgggctaagaccttaaaaaaacctagaccttatatatttgttttaaagaacagactgttttttgtaggggaggagaattatctagagaagcaaagtttgggaagcagaaagttgaaaggtaagaaatttgtaataaccaaggtaaaagatatattttgattctgtactttcaagctaagggaaatggtggtataggtgaagcaaaagcaattaaatattggcaggtttcaaagaaaatctgaaaaaagaataaaaagtttggatgagccagaaatgaccctacaatgtttggcttctgagagacaaattaatgtcttgcctattcctgtaaataagattactgttttttttgtttgtttgttttttgttttgaggatggagtctccctctgtagcctaggctggagtgcagcggcgtgatctcggctcactgcaagctccgcctctcccgggttcacgccattctcctgcctcagcctcatgagtagctgggactacaggcgtgcaccactacgcctggctaattttttgtatttttcagtagagactgggtttcactttgttagccaggatggtctcgatctcctgaccctgtgatccacccaccttggcctcccaaagtgctgggattacaggcatgagacaccgcgcccggccaagattaatataatcttcttccccttacgctgagtatgccataaaatgggcacagaactaataatttgatattaaatgaaagtgactattttaatattattacattgctcataaattaccactttattttatgatgtttgtgttaacacccttttttcctcatgtgtctgtgaacttttctagcaccaagcacatacaaatgcccaataatccctgaataaatgaaggaaaaaattaacaagcaagtgcacaaacgagacagcatgtgagagacagctgtttccagttgtgctagagcagggagagcaagttgatgtgcaggtgattccagattaagaaggaagcttaaataattcaatacgataatgctgtgtgagtgcttagtgcttgggagcagccattatcatcatcaacgtacttggccttaagatcatcagtggtgttcacctgactaacaaattgtatagaaaacactagttgctggaaaccaggataccacttgtatttttagtttatatatcattttcagagacagaagctcatcaaacatcttcaataatatgaaaaattttctattgtaaatttccaaggagttctccatttcataaaggtagagcattaaccagaaattttcatccagacacagaaaccttcatttcagtctgcaacagtgttgttctatgatgtgcttaatggcgtttccatccttggtacttgtatcttagggcatatgtgactgtttgccagggtcaacagaaggtcacagttgagaacagggcatctgcccatagcaacaattcatttgcagatttaggtcaacaaaatagaacatttcatgtaacggtggctatgttaactggcttgaaagtggttattatttcccagtgtatgcatatatgaaaacaatgttgtatactttaaatatatacaacttttgtttgtcaaatatacttcataaagctggaaaaaatgaaactaaaaaaaacaaaaagtaatatgtgaaatatacttaaataatgtttcaattatgcaggtataaagtttaagaaatatttaaacaaacatgttattagctgtaatggaaaatttgcatgagtttgtaggttaaaatgtcaaagtgcaagtacagttttggatcataaaaggccattttagaagtgctccaagcttctgaatagtattcatttgggttattcatttaattttctgcctggaagggacatgtagggtattttgatatacatattttagaaacatatgataattaaagcaaatttcatagattaacatgcagcctaaactgcatgaaaatgcgtaagtgatgctaattcctgatatattttggggtaaaattactgaagacttttaatcacatgtttttatatctttggatcttccctacattgctttcaagaagtaactcaacagaataaagtacacagctgaccttaaatttgcatttgttatcatgtcatattaaatatttacagatcatttatatgtgtgtcttgattctcatagtgattttatgtgctccaagaagatatctcttttagcataaacatatactttactaacagtttcatcaaattttaaaagtgcgaagtatacagattttaaatgcatttcaagcagatttcttttaaagaaatatgctcattaagaacaattgagaattgatcttgtagcatgcccacagtgtgtttgcctgtcgatattgagtattggaaaggttatcagattgttaagcaacaaaggaaaataaattttgaaagtttcattgggaaatagctaaaaacataagactgtataaaaaaattaagaggtattagtaagaaatgtgtggattcttccttctcttaacattactgtagatcctgttttatttcagctgtttgttcccttatccttacatttatcaggattcttctgtgttcaactggctaatctgaatactaaccataacaaatagatgtttggaagcattaaagtgatgactttcaaaggggttattatcatttatcatgaaaatgaattcagcccactgatggtaatttagcctacagataaaatgaacgtcatatgtttataaaatgaattttcaaatgtttaactttctcaaaataatatttcctaaagatgcgatattgcatttaatatgttcacaggagacactttacctcactaatccccaaattctatgtttaaccattgtagaaaggtggtagtttatagactggttcccacaaatattcaatggacagaatttcacaagcttttatggaaatattctgttgtatccctcaaatgtatagattgtctgcattatagcttgatggtgattctgggctccagaatcagattctctgggtttgaatcctggccccaccaattaagtgctgtgtgatattgcttcagtttcctcaattgatgacagtgctgaccttatatgacttttgagacgattgtgagataatgcgtgcaaaagtgcttagaaccacagttctcatggttcccaaatgagctgtagtaccgctagcactacaggaaactcagagggacactgcacaatattttaaacttctgtgaaacactacatagacttctgtctcatggtagtttggtttcagtattagattatacttcattccttttgatgtcatatctttgcaaagctgagttttcatcagttgctatgacaaaaagcaataccttgtaaaaatcatcatggaaaaagaaatgaagctgtttgtgtctagtttaagaagttttgcagtgccccaatagacacatattggtaatttgtgattatttaagaattaactaaaaatatacattttgttcaatgtatgtgtattattttctcaaatggttactaagttgttaagacagaaataattaaattgcttagacctgtctacttaacggacagaactgttaggtgttttgtttggtctaaaggcaccgtgaaaacattaccaagacactgaaggcactactggaaagtttggaaatgtctgtgctggcttagcttttgcgtgtgtgccctcagtaagggtcagttgtttctgttgatggtagtgatgagacagctaagtaaaaagggctccctaacagaacctccaactggcctgcacgctgggaggagtgcacaatggggcggagccttgggaagttcacaccatttgcagaggggaggagccgggcctctcctgatccgggatggtacctgggattcagtctgtgagatgagggtctgttaacaagaacctctcttgctttgatgagttgttttttttccttttcacccaataaattccatttttctcacccttcaatgtgtctgcaagcctaatctttcctggtcatgtgacaaggaccccgtttttagctgaactaaagagaaagtcctacaacaataatagttaggaagtcaaagccattttcttaagcttaactcaaattcctctgatcatcattttaacccttttcttcttgtctaatgacagtgagggggaaagagagaaagaatggaaggagggaagaaaataagtaaatctgctgatggaaattgggatgtgtgactggaagggcagaaatgaaagcaatctccaatgaagggagtagaggagctgtttcctgtgaaaaacaggtgagtgatgtatcatgtaggaattgttcgaaaaccagtaagaaacctcctgtggaccccagccctcaatccagcctgaagagtaggaaacatgtcctggtggtgaagaggttaggagcagctgtacagagagagggaaagaaaagaaataaagggaggtttgagggcagacagtggggcagggaatgaatttccagcaggactgtggagtggcccacgcggtggtgcctggagcaggggaccacatgtgctcaggtagagaagcctccaagctccagatccccagctgcccagatgctcgtggccctgcccacagccaaggaggtctgtgaagggagtcattgggctgggttttaatcctcagaacgcgagccagatgcttaaccagagagattcccaccttcgcaccccactttcctcacctatttaggacttcctggtggatcggcggggaggaggacagagaaaattgttccgctgttaatctgcacccttactgtacctctaagaggatggtctggggaaacacttgtcacatctggaaaacatttccttaatggaaagagagaacattgttagctattcatgtgtgaacatacagctttttacctcccttctctgagccatttttttcctccatgttaaattatagcactttcttcttgtcaaagggcctgcgctatacttaataaactatctaattaataaaatttaattttaattttagaaaagtcccctccctagagaagccttctcccaaaatgaagctgtatttcattttaaatttatgattaattttcattattcctttggtaataattctaatgctgaaatttgttatgcatcgtttaaggagatttttgaattaaagatatttgaatagtcattattttgccatataaatttagttttatgtatatatactaaaatatataacattttcagagttatatgtgacaaaatacctctaaaatttagttgttaagtatattaaaactactttcaccatggaaaaaacctacaagtaaacataaagatattttagtgagcttaactttctcagaaatcacaagttctgagtcacatatctgaaacgatgctaacaatatttagggcttccacaaaactccatcttgagagatttttgtcaagtctttggctaattaatactcgaggcaccctgttcactaggtttttctgtggtttcattgtcactgatgcatattaatgacatcagacaaataaagtgtctttcgtaattgcttgtctcaaagcattgtaaaaatcaaatatggaataattaaaaattcatttacggtttgtggctgtgaatttgactgctggaaggttgagtcgaaggcccatgagtgtccttgataagtctgtacagttgattcccagtccagtagctgccccagtcatattatatagatggcttcagtcaagggagagtgggatgttttgaaatacagcgtgataactgtgcatgttagcacaaatagccattgaaaagaactgttagaataactgttgacaggaaagacggttggctgtttattttccaagataaaaaattagggtcaggtggtattatctatgtacttttcattattcatgcaaaaccaaacaccttcagcagtaagaatattttgtttgtgaaacagaaaacattatttcactgactgggccacttttgttaaaaatatctaatagatacatggttgttttgaactttataggtcaattttagatttaattacctattaaattcccaatcatgtatagcattttgtgttgtattaacaaaatagtagattctctgaaattgtttaatgttttaaaattgtcttggttaactcaagaatggataaagtaatataagaacagtccaatttatatggtagcatattgaattttaaattctatagagatttattaaaatttacattttttacatgagtgcaattacattttaagtgataaataatccagaagagtgtattttataaggaaaataaatgagaaaatattttcattgtctaaagatgtagtttttttttatgataaaaaagattcactgtagggaaactgtaattagaactaatttatccatttgttcatggagttcccttaatgagcaagaatgccacatactcttaattatctgtaaattttgaccatttacataaataatcctttttaaatatgagtaggacttatgatactaagccactcttgagcttttacaatatgaattaaatttcagattcttcatttgtctgacatgtgtttattgagtaccagtaaactttaaagtatttttctagatacagtggatgcatagaacaatgaatgaaatggataaaaatccctgttctcttggttttaacattttagtgaaggcagcccaccttaaaaacaaggaaatatgtaaatatgtagtgtaaatatatagcatgttgcatagggtcataagtgatataaagaaatatggagtagagagggaagttagagccagaggaggacaatttaaaataatcatcagggaagattctaagaagaccatagtcaaagcctgggagctaatgaggagttggtgggtgggtggatcagatagggccttgtaggctattctaagaaatttggctttcattctctagtagaagcagctatggaaggatctgtagctgaggaatgacaaggtcttgtggcactgggaggttgtgcagggtagaagctaggagccagtgaagaaacgttagatgtaattgagggaaaacagaatagtggcttctattttgggtattcaggatggattgatttatttcatgtgaggagtgagaggaccagaactaacaataggaccaatttttttatcctgggcaactagaggtatgagttgatttgctgagctggggaattctatgggagttgcaggtttggtgaatgctatcaggagtttcgtttgggacatcttgagaatgagtctaaaatttgaaatagagatctggactgagatgtaaatttgggagttccatttctttgtaatttaggaatagaatactaatgttttataatttttatttctaatttggatcagaagagttttaactgacagtgtagccaacgacaagtattttccttttattcagagcatttcatttgttgttcaaataaaaactaattgttttaggatctgaaaggctattggggttattgttataaattatttctggctactgattaatacaaagtattatttttctttaattgtaaactgacaatagtaatagtaaaagtgattgtatttttattttaatctgattaaatattagaatttgcagtttggaatagtgacaggttttttcttagattagttcacaaaagcttgcattattggttatagtaattaaagtttacaaaattaagaaaagctttagagtactttgtagcctgatatattcttattaagttttgatgggcattctgacatgaggagacagtttttatggaatgaagttaaaccaagaagagataaatgcttacttaaatttgcagaagaaaatgtaaaatatataccttcaaatttctcctttgaggacattcttaatgtaagatgaaagctgttggattttaaacattacaaacaggcaacttgttttttccacattataatgcttgatagtgttctttcctaagggagaaatttctttgctagacttgctttgaaacttcacattgaaaatgctttttttggccgggcgcagtggctcacgcctgtaatcccagcactttgggaggccgaggcgggcggatcacgaggtcaggagatcgagaccatcccggctaaaacggtgaaaccccgtctctactaaaaatacaaaaaattaaccgggcgtagtggcgggcgcctgtagtcccagctacttgggaggctgaggcaggagaatggcgtgaacccgggaggcggagcttgcagtgagccgagatcccgccactgcactccagcctgggcgacagagcgagactccgtctcaaaaaaaaaaaaaaaaaagaaaatgctttttttacttgctttttgctgaggtgtaaaatttgcaaaggttatagaaaaataatagttttaagatactcgatgtgcagtttgttctttttgagggatttggtgatttttctgtttccagttgatgtggttatttgtcccagtctgagtaatgtttagccattgcccatgttctatctagtcccaagtacttgatagttcgtctgtgtttctggtgattttttttttttctggctctgtgatccttgtgaatcaccatccttggtcccattatacccagtcttcatttaaaactaacactcaatacatcttcaccccaccctgacttttttccacattttatgaaaaattttaaatatatagaaaagttgaaataagtatgcagtgaagacccatctacttaacacctagatttggcaaataacattgaactttatttgctttattaagtatctatttctctgtttctgtaaccatctttcaaggcgtcttatttttttatgcatttccaagtaattgcagacatccatacacttccctcctaagtactttagcatgcatatcattagcaagagtttcatattatttaaagatctttataaagtaaaatttacatatgatgaaatgcacaaatctcaagaacttttgatgagttttgacaatgtatgtatctgtgtcatgtaaactcctatcaagatatgaaacactgcaaccacttccgaaaatcaccttttcccagtcaatccctgaccctcaaacctcccaacagcaaccactgttttgattgttttctaccataaattggttttgccttgtgtagaacttcatgtaagtgaaattatatggtatgtattcatttgtataaggcttctttgttcagcatgtttttgagattcaccgtttagtatatttgtagttagctcctttctaatgctgggtgatattccattgtatggaatattccaaaagttatttatccttcctcctgataatggacatctgggatttttccagttttgatttattaatgaaatcaatatgaccttctccttttaaaatatgactcttctttcatctaataagtaatcctcttccccttcaaaacagtcttattatcacccattcttgtttaaggcaagccatacgttgtagcttatttctagaaacactgtgtatataagaggcttttctcggagacttgaaatgaaaggttttagaaacatttctgtgcatctccgagttctctttagctgtctgttccagacagtcactttttttttttctaaaagtcttccatttagacagacacatgaatttctcttgcagagtctgccctttacatcttatttattcctatagtcatgttaatttggagacaatagaaaaatttttcctctttcatgcataatggatggaaatgtgtgtaaagaacaattacggtgttccaggtaattctgtatctattgcccccttcagttgagagtatggcaaaacaaaaagtcttaaggttcaacaaagccttcaccttgaggctgtggcccatcagggtatgtttgctcttttggggttagtaaatgtatacactttcgagcattgagcttgatgttacctgtggcagtcactttttgtagagagaggctctgcatgtatttgctaaccacttggtatcagaagattccaatcggatttttgtatttcccctcagagttttcaagaagcaaaccaccaagggcattatgatgtgtccttttgtctaaacaccttttggagcgaaatctgagtacacaaccatggccttatgccctggagttttacagctctacgtttgaggctaggaaagaagatctcaattgagggtagtgtaatatattctctttgaaaaaattcccttcaaatacctttgtgctcacaccaaagaattattgtatttgattaaatgtaaggccaagcattcaatttttgcattttcttttctcttgcttgtgttttcagctaatattgcagagcattttatttactcaaccagattgacaagattataactgggagctgtgtgtggaagcctctaatttttcataagtaaatgaattaatttatcatcgctgttgtgttttattgctgtctctgtgcgagactgccctgctcctttcttcccccttttgccttctaaacattggatccatgtcatcgtgtttgacaggtttctgattcccctgtcagatgcaatttggtgctaatcacatttcctttgctcagtgtcaatgatacaagccatgcataatattcctatatgtccactcactcacttgcagtgcagctggaatatcttgggcattaatctgagagaatgctgcattgaaatgcaaaaatgatgcttgagcactaagataatgtggtcaggcagatgtgcaatagataagtgaggctaaagtggtgatcttttcctaagctttgatgaattttatttcatttctgaatatctctttacaaacctgagactatgtaatcagtgctggttcattagaccttccgcatttttaatagaattcattcattgtccatgtgtgaagaaataagaattatttttcccattaaaaagaaagttataggtggttatttttaatgttgaagagtatccctgtctagatcatacactctatcaaatgcatgaaagtagctaacaatctagagaaatctgttaataataagccagtttctaatctagatgaggtcacaaacaatagaccttatgttagatcattttagacaaatataatcaaagtatagtgggaggatttggattgatttggaatgagggtgattgtttattttttgaagtctagttaagatgttttgacaattagagtagggtggaagaagcactcaaaaaagaaaggaataaaagcaaaattagagacaggagagggtggtgtttatcagtgaaatagcagttatccattttggtggtaaataggactagaaaagcatttcaggagcatgtgagagaggtccttattttatagacaagagggaatctttttctgttattgttggagcaagcctgtgtcatgattatatttgaattttagaaagaaaagtttcatggtagtgtggaaaagaattagagaagaaacagaaagagatatcaaataggggactattgcaataagtcagataagaggtgagggcccaaagtaggagggtggcagtggaagtacaaaaggtgtgacagatgcaaaagttattacaaactaaaatctgcagagttgtacaactgttgggatgttgcaggctgggggtgtggcatggtaaggagggaagaaagaaccaaaatgcttagcaagtttctgcatggaacagggtactgtggattctgatgccttttaagtgagaagaccagcagaagtatgagtggggtgagatcatgaatttagtttgcattatgctgaatttgagcttcccatgggatatctaaatggcaaagaacactggttaggatgtggggagattcaacggccattttcgtttatgcaataaataatagaaatcatgggaatggttgctgttattttcagggagagaatataaagcaaaaagagaagcaaataagcagtgaaaccttggaagtaaggctaaaatgaagggaaaagttgtaccaaagtgaactgagaaaagactgaaataagcaattgtacagaaaagggaaggattgtggaagctggtggtagaaggtagtcaacactatcacatatggtagaggaagacttaggtagtactattgaatgaataaatgtaagaaatttttttttcttggtattatttatacagtgtttaacaagttccaggcaggttcaggggagtagtagaacgaaaagtcatattgcatttggttgaggagcaaatcagtgttgtcacattggaagctgctcattgttcacaactctttgaaagaaattggtggtaagggaagtaggaagaccattgggattgtagcttaaaggaaacgtgactacaaaaaaaatacagtttttttttttccttttaaaataggacataccttctcaaaggagttgagatatcacccccaaggggaaccaaggaagttgattctttgggaacaaaaatatcttaaatattacaatgtttgtgtctctccaaatctcctcctacctgacaaaaatcgtagtatttaattgatcttgtttggtttttatttgggtatcacacaggcagcattgactgagttcataaacgatataacataccttttatgatatgagatcagtgttccaaaactatggtgcatatacagcttagttgtaggactccatttattgctagatctcagagttgaaacctgagaagtggcctatgtctgtctgcctcttagctacctctgactgctttgtgtttatgtgtgactcagattttgaaagttagattagtttatattttattaattgtaaaaattattcaacccattattaattatatcaagtgctgagacgagaaagtattgacaatatctgaatgattatccagtagccagttaagtgaaaaattactttcttgtattcatatcaaccaaaggttaaaggtaaatttactgaaaataaatttaaaaaaataatttaattgttcagttgttttgcttttgctgggaaataattttgaaggactgaaaaatttgattatattgtcattattatgtatttttgtatatttatttgtatattaaatttgatacagcacaacttatgtaaaataaattgcattaatagctttttaatttttaattagattttaacttaaaaatatattcagtcagccttaaccctatacttattctttttatgtattatataaagcctagatatatgtgcagtacatcagcaaatatacaatatattaaaatttcatatggaggtggcaattaggaaggcaatgtcttaaaaaggctctggagattgggtggaagaaaaaagattgagaaatactgggatagagcaatcttaattattgttcctatttcaattaaataattttttacctgtgagagtcactaaacaatatgacaccactgatgctaacttttagaaaaaagcaagaaggtagcctacttttgacacaggtgcctatagaggatatacttttattgataatttttatacacagaggtgattgtgattcacaaaaaattatagtcaatttcagttgcagtatgttaaattggaagtcaaattttagtgatccgaattgaatttcaacataatctagaatttgtaggacactaaggacatgttacaactgtgttatttgccttagtgatatagtatttgatgcatgatatttcaggaaatattttattaaactcagattctgtaaaagctgtaaaatgaaggactaaaaccactgatggtgaaataggatcttgagcaaatcagatcttatgagtcttgttttgaaacagttaaagggtgtaagatgtgtgctttgactgtgcaaccaaaacagtgcaatcccaataaacattaatctgcagggaattttcaaaaaggagaaaggttacccaaggataacatagaactaaaacatcatggctttcactgggagaagatactttcttcttcatgctgttagaatgttaagagaatgaaatcttcccattcatttggtaatgggacattgattataacattggtagctgcttgtagcttaattcgatctgaatctttgtaaaatttcaaactagtattaaaggggcattaattttacagattttttctttttaaataaggaaaagttacaagcatatgtacagcaataccatgtattaaaaatatatgaagatatcaattagttactactaaaattgttaaaaagtcatctgtgaatagtcttttgcaagatttggctccctctcaaatatcttctgaaaatctttgtgaaaaattattattcaacagtatcagtccctactgcttgtacaattctgtaatagaaatgctgaatattagaaaatgaaaacaaaaagcctctcccagcttttggggagctttaaatttaatgtaaaagttggaaggtacacacatctaaaactgttcacaaactgaaataagtgaaaatgcaatgcaagtgatatatgtaagtgccgaattggattcacagtaatggaatgatcagcgaggctaataaaagacaactctgcaaaaactgtatattgagcaggattttcaataaagagaacagtgtaaattgaaagagaagaagaaattctgccaactgtaacatatgtacctgagctatacacacacgcaatctgatatatatgcatatacatgtatacatatgcatatatgatatacatatatatcaggtatataaatatatgtgtatatacaggtatctatgtatataagatatatatgtgtatctctctgtccctgtctcaggcacaggtaaaagaaaacccatagctgatgcagatgtgggaagggtaatcaattatctctgagtaataggtagaaaaccctgggaagaaataagcatggaaaagtgtagttacttactgtgtctaagccttggcagctagatagcttgagactcaaggaggaattttatctttcctatgatgatggtggctatgaagagaaataaatcaatttttattgttttactgaatgcattgtttaactttgtagctgggattgagacaatgccaccctccatcaccaccaagcatcccaccctctttgatgagtagtagtcaggttttgaccttgtaattgagctccttgagtccatgtgacgaaaactgactaccctaaacaagaggaaatatattggaaaaaaacaagggcttataaaataaatagggtgatgattgagaatttaaaaatgaacaggaattacggcaagatgaggaaacgagtcaaaactgtttttcagaaggaataagctagtcaggatatagttctgcaagcagacatcagacttttctcatccttgggtcatttcagtgagattcacacctccaagagacattattgactaagcttaagcctcattcttacccctactgatatggtttggctctgtgtccccacccaaatctcatctcaaattgtaatccccacatgtcaagggaggaacccagtggatggtcattagatcatgggggcattttcccctgtgctgttttttgtgataatgagtgaattctcatgagatctgatggttttataaggggctcttctacctttgctcctcactcctttctttcctgcctccatattccccttgccttctgccgtgattgtaagtttcctgaggcctccccagccatgtggaactgtgagtcaattaaacctctttcctttataaattacccagtcttgggtagcacctttataagagtgtgagaacgaactaacacacctacattttaccactccagagatatatgcgtatctagcaactttggctttggtagtgagcactaggcacctggatttgtcacccaggcaagaccacacacaaagtaatcccccagagaaaatcacagggctgttaggaatggggaatggatggtgcttggacaaataaatgttgagaaatgtccactctgttatctcttgatcttgagtggtggataggagcagtttatcttaaagtccttgacatctgtagcagctaattatcatttcttcaaattctcattatattttcaagcaacttcttttctcctaaagaagttcctaggtgaaattgttctctgaggaaaatagcacacccctcatcactaagaatagaacctgagtgttactaattaagtcccaattctaattatgttaatgaaactgcaaggggactacacagctagaagccccagcgcagtactatgccatgccatgcagctgtggatctcctcacaacatgtgagttcgatccgtgacagcattttacccttattatttctctcggaagcaaactaggtcttcatagcagttttgaagtttcctcagttaatattctgttttctttggaccattgacctcttaaattctggtacagtataccagaacccaaggatacactctagcaatttctaaatattcaattgtatagcatactcttcaagccagttttgaaattataagaatggcaaatacaaatacatttgccattttttgatattaaatattagtcctatgttaaaatatgtaaactgtgacatctaaacatacatgacaaaagatatatatgtgtcacctaacagctaagctaacacaaatgatttttatcactggaagaggagcaagtaattccaatagtatgtttgggattataggcagaattatgatacccccccaaaaagaaatccaaagatgggattagaaaaagagtttgagtttttaattagtattttagcaaggaatgcatagccctctttaggactaaagaataatacatttttggtgatactaaaaaaatactgaagatgtaataggactaatgcaatggactgaatacttaggtctgccctccgcattgccaaattcctatgttgaaatcctaactcctaaggtgttagtattaagaggtagggcctgggggaggtgattaagtcatgagggcaaagccctcatgaataggattagtgcccttataaaaggcaccccagagagatctccttctccttccaccatgcaagggtgcagcgagaagtcaaccatctatgaaccagaaagcaggccctcaccagacaccaaacctgctggcacctttatctcagacttcccagcctttagaagtgtgagaaataaatttatgttgttcctatgctacctggtttatggtactttgttatagcagcccaaatgaactgagataacaataacataattctgttttggaaaatgtactactttggctgctttggattataattataacgttaaactcatgtagtaatggtttgaattgatacaggaatccattctattagagaggagttataggcacaagatatttcaagaaggaattttgaaaacgagtcatgactttttctgtagcccattacttgtgctccttaataagacctggtagtctattggaagctatgtggttgaagtattagcagagcatttagatagatagctacgtaggtaggtaggtaggtacgtaggtaggtaggtaggtaggtagatagatagatagagattgatagataatatatgtatactttgtaatttaagcttgtatctagaagaaaaagcatctatcaattattactacaaaaagatgctgtttaataaataattgcaaaattgagtgatttaaaacagtaagcatttttcattgcccatgagtccacatgttagctgagcagttctggttttggctgggtttactcatgtatctttgggtagttttaggtcaattaggcagctctgctgatctaggccgtgtcctctcatgtgtttggaaattgataggctattgcctggtttcatatgaccttggctgggacaattggactctccttcataggatcttttatcctccagcaggctagaccttgttctcatagtagtgggagagttccaaaggagcaagtagacacatgcagggtctctagaggcctcggtttagaatggcacaatatcaattctatcacttctgttgggtaaaataagtcaaagttagcctagattcagggagtggaaaaatacactctgcttttgatgaaaggagtttcaaaattccattgcaaagggaaagactacaaggacgataattggggccattttaaacatcaatttaacacaaaagacatataaacgtgtatgcctaaaactctgaaatactatcacaatgtgacttggtgcttaaacaagtggagttctaaatcatttgcagggcaataaagaaaacattgctcctggataggacagtcatcaaagacgtcttggtcaatctcatttaagtgccatagttgggtgaagatctcagtgcagaagggagaaaaaaacagaactttaccttcccttgctgtaggtgagctttgggcatgctgatttagcattctcctctgcttctttcatacttctttctgagaacatgcctttaacttttgaatctctctcctgccttaataataacaatagttggagtggaatggctgagattgtagctgaccaactgacaaaatggagcaggtgagggtcatgctagccttccacccatggacagtatcttagatgaaaatactccactttggaattgcaaattgacctgcatggtctctgccctggttgccctttttagagtggaaatatttaacttgtttttccaatatctgcaaatggttctaactcactaaaccactaccatcctggttaatagctattgcatgcagttggttttcttaaccagaatactttttttttttccatttcagcattccagaacttaaccaaaagtattttcaatatgattacatggacttcttcccaatatgcttctcaaaagaatttgctgttaataaaaggtcactatgtatatcataggtaagcatgctgtttttggatgcagctatgctagtgttcactgctagttgaataatctgccagtggacacacgcttcactgacattgaatgttaaggattctcagtaatctaaacgtcaaacccgccaatattagtaacttgaagaatggatcaagacagcttatttgttgttatttcacatttataaaacgtcttaacattactatcttatacttaaatacagtttgtaaattgataacaaaatgagttaaaaattactgggaaagtccttttaagtaccaaaatgaaataaatattcttccatgcttaaatttttatgaggaatttttatttccagcaactgtaaggctgggcagcaatgtttgaagaagtttcaataaatgtaaattgaataatttttttttttggttttatagattgtcaggtgatcaaccaagtgagaagcttttataaatgtgttggttcttctctgagacatgagtgtttgggagaaagtcctcccttaccccctgccaagaatcctggtaaaacagaaaatgaaaaaaaaaaagtgttgttttagaatttcatttaaaaaagatgctactatttagaccactccagacaatttaagtcttcctgaatccaactgtatttctattccgtaacagtttgcaggaagatactaacctttaatttagttgataatattgagaccacctttgagatgaaaatctgggtgtatttttacttgtatctatttacttgtagtctaagtaagacatgtttttcctctttgccaagcccaactattttattatttttttaataataattctgtatcttcttgattctctgggacttctgttcaaagaagtacttttttgtcttttatgttttcaattcctctctctatgtagtccattctctctgtacttgcaaacatgtttaatttttttattcttaaaaaaccctgtgttcatttacattctatgttttttttttccttttcattttctatctaacattttggagtacagtggtcccctcagtattcccaggggactgattccaggaccttctgcagataccaaaatctgtgaatgcgcaaatccctgatacaaaatgatgtagtatttgcatataacctaagcacatcatctctaggttactcataatacctaatacaatgtaaatactatgtgaagagttgtaatactctattgtttaaaatttttattatttttattatttttacttttggtctgcaattggttgaattgatgcagaatccatagatacggagggctgactatattttgtactcactaacaccaatttcgttaccatctactagttccttaagtcaataaccctaacttcagacctgttacttactggctctgtgtctggttaaatgtccttgactgccctaaaacttcatttttaacataatcagtccccatattctgcaacttgttttggggctattagagccctcaaaccatttactatattcatctttttctgaagctctgtcttccagtgcaaaactatctggtgctccttcttgcttgttcagacagttctttcttcactggctgcctgcagttgtctttattcctctcttagatcaatagcttgtcttacgtctggtttccctattactgcagaacttatctaaaaaccacgatgaacacttgagtatatggtttatctcttcaactaaattataagatctctcagggcacagatgataatacaggcttttgcctttctgtttaaacaagaaagtaagacaagttctctaggctgatgtcacagtctttgactgaaagcagttccatttattggctggatgccgatagaaggaatggcttaggtttaatatagaaaaaaaaatgaatcaaccttgaaagatcttcaaggacgtttgtggcatcaaattcagtattttgtagataaggagttagcactttggagtcaaattgccttacttcaaatcccacacccaacacctgtaagctatttgagctcagtcaaatttcttcaccattttaaggttcagtttccttgtttgtgaaatgggaataatcatagcatgtactattagtgtttattgaaattatccatgcaaagctcttagcatagtgcctggcatatgaaaagtactcaataaatgttagcatatcaactttcttatcaatttatgtgtattctttttggggtttggagaaggcccatttaatgatagtttattttaaaataatataccaacatgaggttttattaaaattagttgagtttggaaaactttgtaagatagccattgtccttgtaacatggggtataatttactttgaagtataaatgcttagaaattaacaattgttttttttttttctcctaaggaaaaaaatagtattggcaagctttccagcttttgacattcttttaagatctttaaaatactacagatctgattcagccttcagacctgttacttactggccctgtatctggttaattcacataaatcctctttgggctacaagttacttttacttaaatccaaactaagagtggggggcagggaagagaataccagtctaattgctaaagtttcaaaacagaagaatgaatttgcacctcaagcttggcatctctgagcatgtgaatcagtctcagatactcataatcattgctttgttttttaaagacctttgattatgagcagtatttaattacacagctgcaaaattcttaagacatttgatactagaaagagacaatctaatagacatatttaccatccctttgtctacatttgccgaattctagttgcatccttttaggtcaaaaggtaagctacacatttggtattatcttagagatcttttcatcattcatgctttcaatgggttacagtgtaatgtgatataatatttcagtatagaggattgacacaaaaattgttcatttaagcagtttttatgtgcctttaaaaatcatggctcaaagtattgttgaagcttgggctgcaagcttcttgccatagtctagattttaattccagttagtattctctacttctgattatgtttcatctgtaaaatgagcttaatgctcttatttcatttttttctttagtaaaagaaatagccccatgtaaattctcctttaaataatctgcctttaatggtctctgttcaatttatatcctaaaaatgtattttgcatatgaccaagttgcatttctccctaaagtaggtgaaatctaattcttacttgaaaaaatggtatcctttctccatatgattgttattcagtgtttattgaagtatatttgttgattcaaaatgcaaaaagggagttttttaaaggcagagaagaatagatatctaaataattttgtcaagaaagaatgtgtttttgattaacgtaataaacattctttggaagtaaatgtgtctaggaattggacagtagtattgtgtaatgttttatggtgaaaataagtatgtttatcaaagaaaaggtagattaaataaacagacaaaaccatcagtcttgaccccaaagaactgtggctaaacctggattctgcatttttacactagtcagtgacagctcattaaagggcttacacttgtttgtcaggttattggcactggtagtggtaaccccagggtaatgccactatccctttgcctagcttgtttggctggtgaagaattaattgtagagggttatgtattattcaattacccaaagtcttaaatcctgtatggcaaaattcaagactccccagactgtaacagcctctaagtgacctctgtctcaaacctcttaggaaaatgttggtgtgaagaactgattgctctaaggtgtctgtagggacagtacttgaaatagtttaaatgagtaactgttttcatcgttagaattaatagaatttgtagggccctgtgcacatcctgcatatctgcctggagtaaaattactttacaagctttagataaatgaaagctacccagaaactctcaaggaagagtagaatattagctgatgaaaattgtgtgtggatgtagggattcagagccacaattaatttacatttgattttaattgatgacactctgatagatcacagggactttaattaagaaataaaaatgtaggcagattagaatattggtaattggaaatagaggagttttaactaatgaagtgtggctttattaagtgttttgttcattttatagaaaatgttatgtagaacatattaacagttattttcacttaaaagaaacactgatatttagaggatttagattctttatttagaaatatgtgctgtgttagaaataatggttgtgactgtaaagccccaaattgcttgtaatgttgtgcatggacttctaaaccactgtgctttattgcaagctatcagagttcatcttttagggacttttggttcaaacatttaataaatggctgtacattgttaagttttccagggtagctacttggatctcttgcctctgttcagcatctcacttcaagttacttctctctttcattgtctctctaatttatttcctaaaatgataagtgtcaaaaatgacatagattgtaatttgcagtattacctttgccattgtggattactctcccttataattacagcttatacagaaacttgcttgatgcttccttgtaatcagaataatactaccttgtatttatgcagtctttctcttgtgacctcaaagcactcttgttaattgtcaccttattcctatgagcaaaggagacagttgaagaaagggaggcttaagtgtaaccaggttaaatgacttgcctagggtaaagccataatcagtgacatcgatgggaaggaagccaggtctcctgattctggaccagttttctctcttctgcatcactctgccttgacattttttacttgtgacatctgtttccatcactgtcatgctgttaattacttaatatcattttactgcaagatttgctaaagggaacagatacactctgagtgtttaaaaatatgtttaatgcagcatgagagaaacagtgacactttgtggggaggacatgtagattcattttattggattttggttgcttgatgaacactgctagtttcggggggaacactggaggtttcatgttttacctaaatggtgtttttggaacaatgcaaatgcatagaagtcactggtctggttttcagatatgcacctaataaagcaaaacatgatcaattcattgattactcaattacactcagtgacgtgtcccttgaattagcagatatgcctctttatgctcagttatagaatgtatagctaggcttttaaggctcatgcatatttaaaacctgcttattaaaatatagacactattacaacctattttccagaccttttttattattaaaatgttctatttccctttacacactaacatgtaaaactagatctcttgtctgaacattccacatcccgttcttctgaaaaaaggcagggtttagaaacaaagtgggaacggggtaagtatttattagtcagtttgataatttaggtatacttagtggaagggcaagagacttgaagggtatatccatcaaagttttcccatgatgtttggggctaatatatataactcattgatttaataatagaagaaaactgatttaattgttctgagcacagatttattgacaatgaagtataatttggtgactgatagatcttattatttctgccctcatgccctcatttagaacaccttatttgttatatgacgcttgattataacctgatacccagacttctgttagtcactgttatcccacagtttgacttttttactttttgtccatatttactatttttcattcttgttttccctactttttttttttttttttacatttctctatcctgttcacataagaacacttaagtttctcatgttagagtcttctgagaatgtgttaagaatgcaaaaaataggctgtgcgcagtggctcacgcctgtaatcccagcactttgggaggccaaggcgggcggatcacaaggtcaggagatcaagaccatcctggctaacacggtgaaaccctgtctctactaaaaatacaaaaaaaaaaaaaaaattagcctggcatggtgacgggcgcctgtagtcccagctactcgggaggctgaggcaggagaatggtgtgaacccgggaggtggagcttgcagtgagccaagatggcgccactgtactccagcctgagtgacagagcaagactccgtctcaaaaacaaataaaaaagaatgtaaaatatatatatatttatatagtacatatatagtatgtattatgtgtgtatacacacacacacaccaaattttatccttctgttcttttaaaaagtattttgtcaagtatatcatgtgtaactgatacatatttgttaaaaataagctacttccccagtcacagggcttatcattgaaaccattaggctcataataatgtgaagacttattttgaatggaacttgtcccttctctgttttgaaatatcagtattttaaataagagcattcctgttagttctgataattacaggattatagatggaaaatcagagctgatggtaggctattgtgaggctttttctttttagttcccagaaagcccacctaaaaacaaatttccaattatttaatattaattgagtatacattgtgtactaggttctgggaaggccctaagtgtctataaacatgtacagaatgtaagattttgttcaaaattttctttgaagatggttatagatagtcagtttcagtggtctgtttcccagtgtgctgtaggagagcacttttgggctgttcagcctgaaatcccagaacacagttttactccgcagccaggaagagaaccctgtgcttcatgccactgctccagctttctcacccagtgcacggcatgggccacgtgctgtgtggtcggggagtcatcagcggaaactttggtgacttctctgcctactggtagcaatagcatttgagtaagaaggattcttcagttttttttcatccatggtttgaaaacagtacattacttataaataaattgacaaaggtaaaatattgttgatcaatctattaacatgccggcttatcatctttctcccttctcatgcactttggactgtctccctacagcatttttttccctcttgctttttaaaaattacagttaccaacaactcataggatggcaagtactgcttattttaatcctcataataatcccattgaaaaataatattattgtcctacttttacagatgatggagcatagctgtagaggttttagaaatgttccaaattgtacaagagatcatgtagaaccaggatttgaactgaggattctctgagttcacagtcaatctcttaaccactgtcatatcctcatattcttgttttaatatgagtttagtgaatacaaatctgtctaatgttaaccatgattaactgacaagatgaggtcttatcagaaaggtacataaattaaaatagtgaatctttaaaactgccatatgggcatgaaaccgatgcagcaactggtgtaaaaacacacatagaatttgatatataagaaagatggactatgtaccagtaaaaataattttaaaatgtgtattatatacttgtaataggcattgtgataatataatactgaaatgtgaaaacagttaaaggtattgagtaatattatccccatttgatagacaaagaagtgaatagacacacagtgcttgagtaacttgtacaaggtcacatgaacaagagctctttggggggtcccaattattcttaattgtctactggaaccattgacctcggatgatgccaggaccagggtagagagaaagactgagacttgcttgcctaagtcctcattgaaggtactttaacttttgcagtttactttttttcctccctttggatgacttgcacatgcatcttcttcccaactctttttaattttatgaacaggacgttttcagcactgttgcccctctgacacccattcagcttggtctggggatccttgactggtacttgactgtagttccttggatttcttttgcagaaagactgcaaatgtgcgtttcccttctcttgtttgttagtttaacaaccatttaactcttgatcatggttgctggtgtgtgacattatgttgtgtgttgcggtactccaggatcgagtagcttcatatgctctataagctcttcagtggcattgcccaagatgttattatcaaaaaattatgtgtgcatatttcttgattcttgaaatataacatcattctcacttcctgactatgtattactgattagtatgtgtcagcgccactacagaactgctgtgggatcaacaaattgtttcttcttcgctcattatgcatatggctcctctcttgatgttagcagctgtaacagtgtatgcccttcttttatctttgcttcttcgtttgcatgatactctaggcaattttataaattttaaatcctgggtacccaagtaaatatgtaataaatgctaattctccttcataattagaaactatgaacagttttagttttaacaggattgtcttcggggaaatctgtcctactgaaaggcagtttgattggaaaactcagggttatagtcaaaatcgtaaagagcagagaacttcttggaatagagagcagtgacacgccagtggctgagtcctaggtgtgccctcaggttttataactgctgttatcactgccatctgccagagggagatgaaaaccatgcctactacttcttggagtcttgtccatttttgtctggctggatgtccagatttttaatacaatttctcattggaaatattaaagggggaaaaaagtcattgtgacaaaacagtaatgtatcaagtggctttccacttcaactaaactaaaatccacagtccttcctctaccctcctgtgggccactgagttctggcccctgcatagcttacgcactgtattacagccacaatggctttctaaatgttctttcaacaagccaaagcctttgtaagccctaaagcctcagcacatgctgttccctctgcgtggaattccacccgtagggttcttccacttttctgactcccagtcatcttttagctctcagcttaaatatcaccaattcagagaggcccttcttgactaattttcccaattcttcggtctcattgatcactcttataacttcttacacctttcctttcaacacttaaaaaattctatatttgtacatttatctcatacttttcttattcactagactagggcttctcaaccatggaagtgcattaaaatcatttagggaaattttaaaacataccattcctcaatatcaccctagacaaattgaagcacaggttggagcctcatcatcagtgtttttaaacattcttcagatgattctgttgtgcagctagggttgaggaccactgggctagatcataagccacagaaaggcagagatgatgtctgctgaccagtgtatacccgtagcccagtgtagtgccttggagaccaaagagctcagtacatatatctggatgaataagtgaactcacagagagtaaatatggatgcccttgactatctcaatgatttgtgatacccagaaaaatacaaaacatcacagctccaggactattccatatttatatggctggatggcatcaaatgtacgaaacattaatgatatctttttatactcattaggaaaatgagtattatctgacatggtactcctgaaaacatgtcagttacttgtgaaatcacaagtgcatttttttttctatttcttactcttttcttcaagttaactactgtagcaatatattaccctcattttgataaaaacttaaaatatgcaagatccataacgtattaacgctccaaccaaattagttatcacccccacctcaccataaacaattttttaaagactgtttttaatacctcacataaaagatattaagtgccagaattttttgtctattaacccaaatataataaaaaatgggttatatatttccaaggggaggtgacattgtcctttagaggaattgttgtgctatagagtagatcactagaaggcaagtggtagaatttaggacaatgtgttacagaaggctttttattcatgtctgtgcttcaataaatcaaggaataacagagaaatgaagacattatgctgtaaaaacaaatgccgtgttctattttggtatttagaaaattaactttttgtggtatgtacatttcaggaatcaatattttttaacacgatttcttttttgcttattccaaaagctgctgaaatctgaggcaaagtatatcaaattcaacaaagaggggtattataaacacagtattatccatatctataatttaagtgagttttataaacagggccttgtagctttttgcaaataactgataaaatatttctttagggaaaccctaccacctatcccaaatgtataatagtcaaaaatgtttcctatttattatcacaccattatttctcaatcagaatgcttttctcaagccattggccccaaatgtacttaaattaccattatacctgaggtttactgatatctcctgataagagcatacctgctattttactgtagaaacaaattggtaagttgaaatattgtactttgtttctgagagaagaaagataagcattgctttcacaatgatccttttggaaaaatattcataagagagcttaccggactctggagagcttactaggctctgtggatatttttaattcataccatagtgtctttagaagttaacgtaggaagattaatgctcttggagaagagttcaaagtgtttagtgccttttccaggttagtcaccatgccagttgttggacaaagaactctggctcctcttccgacatgttatttcatgttcatctaaaatacagtcccttgtttcttccctgaaaaatgtgataacatcctaggaagaggtggtgatctgagagttaaagggataaatcagaaagtagtgacaattctctgggagcgaactggagtctccagcctccagcattgacaggtaagtgactgtgcagaaggacaggttgtttcattatgttaatgaagtaacttgagagttttttttttttttctcagttgtttatctagaagttctgtgtctggggttgatttcactgttcatgtacatgaatatcattacaaaaaaaattgtagaaaggcaattctaagatatgcagggaaattagtactattattagcaggtactgcttgggagttctgggaacagttcactagctgtaaatataaagaggtgggacaatttgaaggctagctctgttgtcgcagtggttttgagtgcagcttgaaaattagagcttaggtctgagttgctaagaactgctagttgacattccaatgacaccatcatcatgtattctaggagtacccctgctctattttcaagccatggtactcaatgttgcaggagtaccactgtcaataagatagtgtccttagcctaaggagcttgttatttattaggaataaagattaaaaaaatacagtacaagaaaaaagtaagagttataaaagatgtactacaaagaaattcatcatctcaaagatagttgatggagtagcagatattcagtgttgtatgttctattcaattaacgtgggagagttaaaaaactaacatcctagtaattgataaaccttggtgtttgttatatatataaatttcatatgtgtgaatgcaaaatattttttaaaaactttgtttctattgctaaccatagattaaatcactcttcttaccagtctgtccaacatggccaaactccgtctctactaaaaatacaaaaattagcagggcgtggtggcacgtgcccatagtcccggctattcaggaggctgagggaggagaatcgctggagcccggaaggcggaggttgcagtgagccaagatcccaccactgcactccagcctgggcgacagagcgagactctgtctaaagaagaaaaaggaaagttctaacaccttaaggatggcaattaatgccctgataacataattaacaacctggctatgagtggcataaaaaagttaattcacaaatactggaattttgttttgttttctcctcttagacttcctagcaggattagatttattactgctgcacctttcccatgaaaatcaggttttctaaatgggaaagttaaactcattataaattcctcaaggtaatgttggagttctttgtgctgtagggtttccaatgtgggtcttttaacctttgcttccatttgaaggaaattttccagacagatatattcttacttcaatggcatttttagatgctgtacatgatgagcaaagacagtgcagagtgttgaagaaataatttgtgtttccttgaaaactgaatttcattggttttttttagagttctcattattgcaacattctgagtgtgtgtgtatatatatatatttaaattatatctttgtgcatgttctaaatgtcaaatataaccactagaatatttggtctaaaagggagaacagaacttgaacttagtcattcctaaattcatatctttaagctggttttatatcattttgattccagaaatattcacttgtttagattttttaatgttcctttcaggtaatgttcaatatgtgcaaaaatctgagtagctaatcagtaattactactttgtaaaattgaactaagttgggtttttcaacatgtaaatcagccttctttaggatatagtaatcaaagcagttctatgatgcttgttacaaaccaattgctaaaatgaataactaagactaaaggccttttttcttgttggttaaagttaaaactgactagctctggaaatgtaacttttactttccctgtttttatagtaacgcttcattaagatgtcaagtcaaaatatttttttctttctctttctgttttgatatttcatctgagaaccaatatttcaaaaatgtagtgatttagtataaattccttagttccagtcagataaataaaccttaccagattctgtgaactgatttattgataggactctgagggaccacaagcatttttgagaatgtttgaaacatttctgaattctgaattttattgaagttttatcccaagagagaagtagagtgagaggaaaacctctttccacaaatttggacatcgtaacaaagctttaactttctttttttaaaggtcatacaggtatttaaaaaaaaaaaagacaagtagttatacaaacactttggtcaccagtgaactgataataggagcaatcttttgtgtagcaaattttctatgttgtgtagtaatgcaattcaagactggtataaatatttgaaataggaaatccctaaacttattttcatacagtgattttgactttttttgcaatcaagtttatatctctttctgttaaagaaaaaaattaagaaatactttttgtgaaaaaaggaacaacagaaactggggcttacttgaggagggagaggaacagaaaaaacatctactgtgtactaggcttagcacctggatgatgaactaatctgtacaacagacccctatgacacaaatttacctccagaaccaggctgcacatgtccccctgaaaaataaaaattaaaaaagaaaagacaagaaagactttgtgtaaaaagacaagaaagactttgtgtaaatacacctctttttaaaattacccctgacttaagaaagaagtttttcacattcttaatgtgtgtatgtgtgtgtgtgtatgtgtatgcatatatatatatgtgtgtgtatatatatataatatgttaattttcatagatccaaacagtttctctctgcttttctcaaacctaattattttctctcctaaaaggacggtgactggaaagatcgcataggtcacgaggatcttcctatgacctatgatgagaaagaggttagaggtagactggctgctggaaaagagaagccaagatcccagcaatgagccctttcctctgcttctcatggagttcttactggtccccaggttaacctagggagttgatacagtgccctttcccaagcagaacatctggtttactgccccttgcccagtggttatatgtgtgccaggtttgaggatcctgcaaattgctcgtaatggaggtaaatggcttgtgccatgagaaaccaaactgtgattactagggaagatttcttaagttacccagtttggaatttattttgttttattgtattggattccatattaatagaggtgcttggaggaccagttaaggagcataagaaaggctggttttggcaagcagaggacaaatccatcctctcttccttgagggaaagttcgcctctccattgccatccctacattgcctttcctatctgccatgtgcaaattagggagactgaggcaacaaagttatatataacactagaaaactgagatttcagaggggaaacaaagttaaagcccaaagagtaaaatactaaagggaaatttaaaataaatgctagcaataagttagtaaaagtagaaaaggggactaaacattcaaaattacatcacctcagggaaactaagttaagaacaactcaaatgatttacaaaccaagatttaaaaaggaagaagaagagaaatagtgagacaagagaagataatctgaacactccagaaagaatgaaagaaactggtggcacaaattcaaaatgaagtaccacttaaacaagaaacagcagtgaaaccaactaacctttaatacattagtcttgtaaagaaatgtgcatggggaaaaggagaaagcaggacacatttttaaagtggtcctctgaaatgaggcagcttccacagctggaggctccttggagacctataaggcagagagagagagctgagctgtagagggtaggagatgactctctggggcctcctgtcaatggcttctgtcccccagctcccgctaggatacctgaaagggcaaggagatgtgccctttggtaaatagcaatccatcaagctgcaagctggtagcttcccctggctggctttccacaggcatgaaagcttctgtggccatctccatttctttgtgaaagtcctgtctgaggaaagggatcccattcagcctggtgttcttcaggcatgtggtcaaggcaaggcgcctggctaatcagcccatcagctaatcaactattttataattttatattttaatgcagctatttaatccaatgttgatattttataatcagttacttttaacttaaaaatagtgagttttctaaattttagaaaagctttattttgaaaaggtttgctattttggttgccgacggagtgattttgttctaattgtacctgacctcacctgattaagactacccacttgccctcactctttcttcctccaccatggccttctccctttctttttctctccagcttacctcacagggcctacgttagagtaacacttccattgcccacaaatttgggggagtgagagaaaaaattgcacaaagtgcatttgtcagataactcaaattccaagtgcccaaactgtattttaatcttttgttgggaatatcctgggatggggacaatgagggagatctgtacattacataccatttttgcatagtgtgtctgtttacatcagaaaaagatttaaggtagtgttacagtaccatcgggttcatatgctcactgtgcagcaacagaccaatacactgagtcagcagagtttgcagcagagaaggagcttgataatggcaaggccatcgagcaaggagacaggaagaatcttcaaaccttaactttgttttcctgaggggctctgggttcctaaggggatcatggagggtgatggactagaaaattggggtcattgattggttcaggtccgggagatgaaatcaccaggatatagaaactgcatacttgtataagtcagatccttgctgggcccttcagaccagctagctcgggtagttttattgctatgcagaacctgaaggagaagctcctcaaagggaaagcttctcatctcacagtgtcttagatcttatctatagaacagaaaaggaacacagtcttgtgaaaagggctatgttattctggagtgataagcagcaactagctacaaggaagtgagccaaagggcaagtgggcttagtgaatgcttctgattgcgctgcaagcctagttgaatgttttcttcccttaactgattttataaaattttattggggatggcttcagtggccttcttcatagggttattaggatggaaggtctaacaaacacaagcacaaattataggtcataaaacccagtacaaatattgggaaaaatatccctgggcaagacattcaaggtcctttgctttctgtctctaacctttcagtttagccttaattcctgtatttcttttcctgttaacctccagagacctacactcaaaacacatcctgctagttggttggctttttgcaaatagtgaatttgcaatttcgtgctcccatgcgtttgtgtgtgttgtttcttctgccttgaaggacttctcaatcccattgtccagtgaaatcacactaattaggaccagcttaaatgtcatcttcccctctataccttgcttaacagcttccctgcaaatatagaatgcatctttcctcttgcttttctggcctggtattttgctccttcgactatttcatcacatgttacaatatttatattgacttgcatattcatctgcccttcctgttcctgaattgataggttcttgaaatgaggagttgtatgctcagttcttaacacagtgcttggcctgttacaagtactgaagacgtgtctcttggctgtaggaattgaagtacttcatctagtttctcatccagcattactaaacacattttaatccttcctcatttattgaggcacagtcaaggctgggatacatagttctatatctgcttttaattttgctctgtttccttttagctctgctttttctgttttaaatatatgaagtcttccctttctttccattttttctgttaaatcaactctagcctgcagattccatcattgaccatcttacaacctctatgtaattgtagggaacaccgaggagatttattttgcttctaggtcttggactttgttctaatgcttggatgttgccagttgcttgacctctgcgtaaagaggatgtactgtcagggttctccagagaaactgaaccactaggcttgtgcatgtgtacatagataaataataaggaattggctcacatgattagggaaatggagaagacctaagatctgtagccaggaaattagagacctcgaagagctgacatatgattccagtcctggtcagatagcctgagtaccaggagatctgacattgtaaagtccagtgcagaagccagcaacctgaagacccaagaggagctcatgttccagtccctatccgaaggctggaaagaaaaaaacaaacaacaccaaaatgttcagctcatgcagtcaggcagcagagacagattctttcttactcagtctttttatttctagtcaggccttcagtgggttggatgaggcccacccactttgggaagggcagtctgctttactcagcctactgactcaaatgttaatctcatccagaaacaccctcctagtacacccagaaataaggtttaactgaatatctgggcaccctgtggctcagtcaaattaacgcgtaacattaaccatgacagagggagtgctctgcatatgtattttgctagtgatgccaaacagttgacttaagaagggaattatgtctatagagagtatcatttattttacaaatgataatgaatttacagtctttttgagaatttcagagtctagtctcattttgtcaatgacattttattcatggagtaagtgtagagtgaaaagaactctacatattctagttaaacatagggcaggagtccaggagtctcatattaaataattttaggagctaagaaagttagtaaataagtaaagtatgttgggtgtatgccaagccagaatagtgggaactacagtacataggacaactctagaactattttcaaggtatcccttcccttccctcccctcccctccctcccctccctcccctccctctcttagcctttggctaaagtattttccttgtttacttattaactagccacatgtctctagaaattcactgactttttccaggccttagttgttttatttaaatagatggcttatctacagtctgaagattctttccatgcattttacctgcaagataagtttgagaggttatgaaataacacctttgttgatttaaagagatctaccgtgagttctaaaggaaagtgacatgtcatcttctaaagcaacttaatttgcttcccagtaatgacatgatgaataggtctattgtttgcaaaattcaagagcagaaatatcataatcataattttgcaccaaaaactactttgtatactcatgtgcttcatgatgtaatgtgaccagattttttcataattaagtatcaggtctctacaggtgttgccaagtctgtatcttgctatgtttgcacatactttgctttctaaagacttaggaatacttcctgttgtaaggtaggatgacttccaatacatatgtgttggtatgtgttgatttttcttgtttaaaggcttttcatagggtcctggagccttcaaactataaattaatgtgagacagcctctgaggatttatggagtcattttccctttggctaaagccttccatggtcacagaccactagatttaaaaaggcagccagacctgtccaaagaccaacataaattttcagaggcagagaaaatggtggctgcttattaaattagtgagaatatagtatttggcagctacaaataaataatgttttctccccataagctagaagcaagacattgaagctgtgtgattttggacctacatttgtcaagtttagctacatcagttgagaataatttgcatgttacatggagcacttacttgagacttccgtttagatttgactagataaatgggttcacctttgccaaaaagctcccagttctgaccacatttaaaacatttttccccagcacacagagaccgaacatgagcattaaaacaaaaaaaggaacctattgttccagcagactcttctccagttccccagtatttatcttacagggttttctaagtgcaatatcaggtgttcaccattggttgtccgcactcactttctattttccctcttgattcagagaaattatttgtcttagtccaataaaaatagggctttttcttttggtgattcactatatgaaaccattttcaccgacttccagggtttggggaagaaaacatgtttatccttgacagataatggtatttttccatgtctcacaggacccttcccaagtcttttttttcctatacaaacaaaataaattataggactagagactttatgaactaaagttgatgaactgtactggttttctagagtactttctgagaaaatgctgtgtagaatttccagtcatgaaacttgcatgaaaggataccacagaatggcaggcatctttacttcctcatactcagagatgtttttatgagataaaactattgaaaacagattacatttggagatatatttccatagcagactattctgtgtttctatggaaatgggacttatttctcttaaccccaatatcaatatcgcatgggtagaaactctaggtacaaaatgtaggatggatattatgttctaattggtatctttttttctcctctttcagttaaaccagtatctttgtctttgtcttcctttctttttctctttctttctttcttcttttttttgagacagggtctctctctgtcatccaggctagagtccagtggcacaaacacagcttactgcagccttgacctcctaggctcaagtgatcctcctgcctcagcctcccaagtagctgggaccacaggagcataccaccacacctggctaatttttttttaaatttcctgtagagatggggtcttaccatgttgcccaggctagtctcaaactcctgggctcaagccgccctcccacctcagcctcctgaagtgctgggattacaagcataagccacagtactcagcctttgttttccttttaatttttcatgtgatagttatcatctgacattagtggtatgcctactaatagcattttttaatttaaaactacattttataaatttgttgaaaatttatacacattctgctggaaaatttttgagatgttagtttatttaaattttataaattaagtctatcttattagtcaaatgttcagtcacctattggcctgggctgggagttgcttggtctcttaaagttgactttgattatttctaattagaacatagtatgataaatttattcattagatgcccacttattaagcactctctagatacaagatactgtccaagatacaaattaagttgggtcttaaaggatgaataagacttttgatcaataatgatagtgatgattacaataatagctagcattaaatgagcaattccttcatgtccaagccctatgcaaagtcatatctcatgttatacaacaacttgagaggtaggcacagaataatgtgaagatgctgatgttttactgatggcttctagtcctggctttatcacttactggtcatgtaaacctaacctgcccccctccccattttgaatatattgataggaacttcctcctggcactggtaggagaaataaatgagataatacagtctgatactatgtgctttgaatatggtaaacattcagtaaatgttagctgctatacttttctttattgtatagatgaaattgaagctcagagaagctaaataacttccctacatttaaaaagtggtgtgagcccagatttggactgagtcagtgtgactgcagagtctaggttctcaaccttgaaggattctaagaaagagtaccagtagatgcgagggcgtgcggggtgggaggaggccagtgctgaaaacacagctgagtgcatgcagggaaaggaggctgcattcagttccaggccatttgtgggggccttgggagaccttggaaagaaactgagatgttatcctggaaatcaatggaaaataacttgtttttcagttctttcgtatttaaatgaaacaagacatctctgcatttacctttgacttaaactgtcttctaaggtagtactatattttcagtcaagaaatatgaactagacattcaaatgggagactcctcaaagatttgggagattgcagaagatatctcataggcgctaaatactgaaaccctgtttttctttgtttgttttttaaaccacaatctggaatccaagcatacaactctgtcttctcactgctctggaattttttgattcaagcattctgatttcaactagcaaggttccactgggactataaggtgtataaaacctactaaggggactagagattttatatcctctagccagcctatcttctccttgctgggcaattgagggaagaagtcaaaccagagattgcttaggaaatgtgaaaccagaataagcatggagagtcatataattcaagcagggccaacttgctatgcacatgacctaagggttccatgcttataagaggcccatgcttggtttaatcctctactgtcatcatcttgaagtccttaacatttttagaacaaggtctagacattttcattatacactgggccccagaagttatgtactcagtcctagattcatgaatttgatgatattacgccatgatttttcatatgtctgtcaactatttcatagtatgtagatctctgttactgggacttcaggtttgttccttaatccagtggatcccttcaactgaacagtacctaaaatcgtcctgccagcaaatacacctctgacaccattctcctaactgtattaccatctgttatctcattgaaacaccacttctgtagcctgtttatctggtcatttaaatattgttctgggtgcatatttttaagttcactttgtgtatttataattagaacattacttttttaatagatgaactctctgagagaacccatgtttcctgattctttgagaagtgtttcatatgttacctacatgtaaataaaataagtattaagtttgaaatttacatgagagtgggattgtcagagccaactggatgatagaacagaaccaaaaccattttggtaggatagagaaatgtggttagaaagcaagcagtcatcagggtgataaaccagctgaatcctggcaaatatgctgttcaagaaatgatgaaaagaggactttggtgagagtcaaagacgcatgctcacagacacatttttatttttaacctgtcactgtcactggtcagatcctttctagagtttttaatccttggtaatttgaagaacaaggagatagtttacaggaatgcaacaaagatgattgatgactggatagtgggggattgtggaagaaaagctaaaatacataaaatgttattttttctggggaataaaaaaagtaactaatggaagcttagagtctttaagcacatgaaagtttttaaaatgagttttgtgagtagatttaccccgtgctagtaatggacatattatatgaaatttcaacataaagaattttcagaaaataatgatagacacttggattatgcagtcatcgaaatattaaaattttatttgtgcatatttttattgtaatagcttttatccatctgtatttgtttagaatatgaatgtgtgatttaaaaaccaaaggcccatcaatcaaaacacttcccacctgctctctcttaagggactatcaaagtagtaaattaaatgaaaccaacattgttttactacttgcccatcataaaatattactggttccaggtgagtgcctatttacaagagacctttgaagatttaataggggttttaagtgaatggaataccatgtaatgaaaaattttacatcataaacaaaattgaaaggtaaactggcaaaaaataaatttgcaaaaataaaagacaacttcagtatacttaaaataaaaagtacttatacatgttaataagaaacactaaaaacaaagtgaaaaagaagggcaaagagtatgaacagacactttactgaagaagtaaaaatagctcataaaaatattgtcaatatcacggtcaggcgcggtggctcacgcctgtaatcccagcacttcaggaggccgaggcaggcggatcatgaggtcaggagatggagaccatcctggctaacatggtgaaacccacctctactaaaaatacaaaaaattagccgggtgtggtggtgggcgcttgtagtcccagctactcaagaggctgatgcaggagaatggcgtgaacccaggaggtggagcttgcagtgagctgagatcttgctactgcactccagcctgggcgacagtgcgagactcagtctcaaaaaaaaaaaaaaggtatatatatatatgtgtgtatatatgtatatatgtatatatacgtatatatatagagagagagggagagagagagacagagtcaatgtcactagtaataattgaagtttaaacagcatataattttataggcaaaattagtaattattagaaataacacttagcattgggactatgcagagacaacctacactttcgtatgtctggaatgggagaatgctacaacatttacaagatggctgaatataatgtgaaatgttattcaaccatatgaattttctttatttgtctttatggattacaattagggaaagttgctcataagaaaaatagtaattgaaaatatcagaaacaaaattgtgtgttatgcattgtgaattgacatatatatgttaacatacacacacacagagagagagagagagagagagagagagagagagagagagagagagaaggctggagggaaagcaccagagtttaattcttttgaagttttgttcacttttttctctctgtaacacacaaacacactacagacacaatttgctggagggatctgggggagttatatcatcatatcttgcccctacacttttctttttgaacttggaaactataaacaccaaaagtggtaaagtacaaaagtggccattaggtctgggagtattagattgaggactggctttggaaacccagtattgccaatggtcacagcaacctagatttttgggtccagtcctaatttcaaaacttgtgttccgttatttgccgtaataattatgctcaacgtatttcactttttgatttagaaacaagtcatagttttatgtgcttatattttaggtgcttttggaaggccttttgtgctaaatttataaatctaaaactaactcgcaaagactgtctatgattagagacaagacccagaaagtcaactgttcccagaaaagaggtgccacaccacttatgacagtgaggagggagcgaggaccccagccttcttgtcttcgggccccagttagcgaggcatcattctatgttggtttaatacacccacaatcataattacaaatcttgacatttagatgctcccaaagtcagcacccatcccagcagggttagccatattatcactagttaaggagatatagagcaattagaagctaaaggaaaaggttagcacttccactcagacagaaggagttcagcagctaaacccacctgtagttgcagtgttaatttttttaaatatgggctttgaagccttgtcatccatgacaagggaggtctgagtctaaatggaatatttaagagaagtgcttcctcatcctccaatcaggctatatgctgacctttctgtagcctccaccagttgctcagctgtcatgaaatgctggagaaggtagaacatcattggacctgtcatgaggtcaatcagcgggagctcaggccaatttgctaaacgtgttcatgctaaagagtcagttccctaaccagtctggtgaaatgtagtaccaattaatcaccagctaattttcaggggattgtgaccttctccatatttgcagtccactcgctaccttacctggccttgggggatctctggcctggaatatgaggccacccccaggacatatgaagctgtcaaaacttgtgttataggctaccagggtgacaggccaggagacaggtatgcccattgcacctgctccggccagcactgacctattttagtcagaacattcagtgtggtttgcaaaccctaaagatattcatacagctcaagtatatgcaaaatccatcactttgaaatttttaatgatatagtaagatactgttttttctatcaacctatcagttctttatttgtctttagaaggtggtggctttgtcaccattctctgcagaggtttattatctgagagctgttgggttgtcttaaaagcagaaaggttccttttttttattttacaaaataggctgctctatttgtagccaagtctcataaattagaatacttgtcaaaataaatgaatagtatgtttgttatattcatgacttaaaatcacatttgattgcttactcattaatccacaaaattaagcaatacatgctggattgcagtcattagtacaaataagcagcgttcttctaacagtcagccatcgtagagaatactgtacagttgtgtttgtttcaaaactaggtctgttaatgcacaaattagttttacaatttcaaaataattcctctggaagaaaatcaaatacatatatgtagtccaccaggagacaaggttggaatcataatatactaagtagattttagatgtgtaaattgttaaatgcaattttgcattgaacctcaaggatggatggaagctattttgctgtgcataggaacgtatgtggcatgaaggtgacctttatccctaacaggatggaaaagtcaggagtagggagatggtgtccacaccaaagtgaagatacccatatggcagaggctttgttctcttgcttggatatagcagaaaatgtagatcattcatttacctaaggaattttttcccatgtgccaagaaacatacttgcagcttggaatataaagtcagttgtacttcagtttttttcatctgtaaaatgggaataacagtggatttatcataggatttcttatgagtatgaaataaaataatacatttcagcacttaatacagtgcctagcacatagtaagggctatataagtatttgataaatatttttattgatgtgacccatagttttaagtagcttactgttgacatataggtagggacaagtataccaaggaccctcgtgctatgtgacaagtgatgatacagtcatggatatagcactgtgggacactggagggcctggtgcagataattatggcagacttaaactttatttcaaaagtttgacaatgtatgatgaagaacttgaagctgggccaagaccacacccagatctgtttgctggaaagaccactttggcaatagtgttatggttaaatgtcaggaggccagattggaagtcagaagcaaacccaggcccttgccatgctctttgggcttatttaattgttggagaatgatctttgcagaaataaaccaaccttaggttccaataagttattgccttcaaggatttattgatatacctatggatggtggtggcagcattatgctttggctgagagattgccaaggagtatgtttctgagacgattctatctttgctttggctagagagaagaagttgtagggaaggagggaaaatgaaatggagctagttaaataatattgaatatggatgttacaatattgtaaatgtatgtagtgctttatactttagaaatattttccatatactattttatgtcttctagtgttggatatacttgcttcaaatagaatattctttaaaaaaagcaggtaagatgtgtgtaatttagttaagattaacttgaagaaaaactacttgtgtgtgtgtgtgtgtgtgtgtgtgtatgtgtgtccacacattttaaatatcccagcttgttttgtgtctccatttcctcccaagatagtcaaagcccttgagattggaaaaaattagtctatgtagctagtgatacattgggcaaatggcaagtgaggccacctagtagattgggatcatctttgagaatcttccagacagtttaactcaagttttttatttccacctttgcatgtgtctggttttttaaattatgcgcaattcatgggaagcaagaatgttattgacaaggcaggtatatagagtttttaaactttctgaaaatttgtgttattctgtgatgcttgaaacttctccctgcttttgttctggcttgctttttccatagttaatccctagatatctctaggagaagggcttcatggatgccacttgacctccatggcaccctttgccctaccactgctagagatggtgaagggcacagagacaagggctcctcaggcctcccctttgtgtattagatgtgagtcgtgaatgttgtttaatgaatcatgagtgattgtccctaaaagtaaataatacagcagacacaaattcaaaattctctccaacttgtcaagggataacatatcatctttgaaattttaattcaagtcagagaaaaaaatgtgattcaatataagatgggtttaatgtgtatctggcttctttaggaacatactacataatttcaaagaaataaatgtatatttggctgaaatatgggtggttatttaatagggcatatttttgttattatgggataattcaagcagatgcatctttaaaaagtgataaggataaatagggttttcagtacagttgaataagtcatgttattttcttcagaataatgcttaaagctgtaaagtttttaaaggttcctgttctgaattttcagtttggggaggaaatgaaaataggtttatctcatttactgactgtcagttgaactttatgagaatcagagctgttatgtccctgctttgaggatgctggagctgatgcttgcctctgatgaagatgctaatgtgagcctgctaatttttaaaatccggattaaatgcttttagctagctgtcaaaatcctgggaaggaagagaacgtactttgaaacctttgtttaaagtagcataaaaattagctcacatagccaattgttatttagttacaagcagatgcacacatacatttaaatgaaattctgcagtttcactcccttcccaaaggtgataatgtgattttctctacttgtgaaattgttgtaatttcacagtcttacttagatttaattgtgtttattaagatttgagacaaacgattccaattttattttataggatactgggtttttttttgtcttttaatttaacttgatagttggtaacacagaatatgtaggaaacagtaaaaaatatcaatacattgtttagttcaacagtttaacccaaagaactcaatgtggcaaataagcctttcttagtaagtagtacattagttcacttgacatgtaattaaaatagagccacatatttctcagtgtaatcactaataaaaatgccattataaatacagttgattttactctgtagcatttggatgattcttttttattttctacataggctaaagataatagcatcagattataaaaattcaggctataaaaatgacagaatgctacaggttggcaacagaataaaccacaccatgaatattgagagactctgcaataaatgtacttcatggcatttattgttaaaatatttacttgtcggcatagaagttgaaggcattggtatattgcttcaagttatggttggcaaagaccagacagcacaaaccatgtactgctaggcagaagagtgatagagtactgtattgtctaagggttgtgtgttcttgtatgatgaagaacaagaataaaggaaaaacagaaattacctattggttgtgtttgatcttggtactttttgtgttcctctgtcagtcctgtgatgaagagattaaagagaaacaacaaagtgaaagcaaaatacggataaacaagtcaagtgggactcagtctggaagccagagaaggatagctatggtaggaaaagaaattaaatttaacctttcattgtgtgccagcctctatgctcagcatttgggcatgttagggatattatcaaggaagttagtattctaccctattccttctcacccccaaaaacactcacatgttcacacacacttttactagtgatattgatcataataaccttagtgttttaggataaaaacagatctgagtcctggaagggatactgatggagtgaaattgcagagtacatggctctttttatcagatctgttattcagggtcatggatgttgtaaattatccaaagttcttttttattgtttttaaattttgctttaagttctgggatacatgtgcagaacgtgcaggtttgttacttaggtatacatgtgccatggcggtttgctatacctatcaacccatcatctaggcttttacctctgcatgcattaggtgtttgtcgtgatgctctccctcccctttcccgccactcccccgacaggccctggtgtgtgatgttcccctcactgtgtccatgtgttcccattattcagctgccacttatgagtgagaacatgcggtgtttggttttctgttcctgtgttagtttggtaaggatgatgatttccagcttcatctacatctctgcaaaggacatgaactcattcttttttatggctgcacagtattccattgtgtatatgtgccacattttctttatccagtctatcattgaagggcatttgggttgattccaagtctttgctattgtaaatagtgctgcaataaacatgcatcttcatgtgtctttatagtagaatgatttatattcctttgggtatgtacccagtaatggcattgctgggtcaaatggtatttctggttctagatccttgaggaattgccacactgtcttccacaatggtagaactaatttacactcccaccaacagtgtaaaagtgtttgtttgttgttcttgttgactttccttttctttttatctttacaaggtaaaggaatgagaaaaatatggaatgagtttctaaaataaggtttatggatatcactttttttctaggagaatcctagtttcagatgttcctttcagatcgcccctgggaacataggagtgaatgcatacagttaatgaagctagtgcctaatctttaaattgggaacaccagtcagccctggcaattaatatctacatattgaaaataattcacacataccacgttaatgtatttatttccatgtgttttcctaactcctgtttagaaggtagatatgttcctgtgaacctctttctctcaaacagggttacccaaatcatgagataaacatttcactttcctgatgccttaatcatgcaatcttttcatattgaaaagaagtacagaaagctgttagggtctaaaatgtgaaattttcacgactttgaaaataaagctggacacatcactgttgagcttatgacgtgcctcttcaggctgcatctccacttgctgtgaagttttattcacatttgtccttaagctactttaagggacacttttaaaaagctttacaatagataaatcaaagtggtgtattggcagatagctgggtgagggagtgcctgggacagactgcgaactccaccacctctccattcagcctgcatcctgcttcatccagtgaccaaatgggctgactccccgttttgaaagtgagcctgaaaaggaaagagaagatagataatctccagttttggagtatgatgtggcagaagcaatttcccccagtgttgaataaaaaaggaggaatttatcggccataatttccaaagccaaaccaacaataatgatgatgatgatacctagagcatcttaagattaaatatggatcatttatacacattcatttaattttttaaaaaaatatttgaatgtttattctaaaaacatgtgaaaaatctaggtgtcttttgttgttgtgttaggttttagtatctgtttgcctcatatttcactaatttttttcagcaaatttacattgagcacctatgatggcatattcactcttcgagccaatggggatacacaatcaataacaaactcagggttctcatggagcttacattctagtgaggtgcggagacaggcaataaaataagaagagctgtgatgctgacaggatgatacacatggtataaaataaaacaaaggcggagaatacagagagtaatgaagatgctgcaatttagtgtagccagagaaaggctggcatttgattaaagatctgaaagatcgaggaagaagccttgcaggtgcctggtggaagactgtttctggcagagagaacagcaagtgcaaagaccctgaggcaggtacaaagacaatagtgcagctggatggagtcctgagaacaaggggcgggatcagcagaacacgacgtcagaaatggaacaggagcaagtgaccttctgggccattgcagagacttaggcttttcttcaagtgaggtgggaaagtattaaaggagtctcatcagaggagacaggtgatccaattcatgctagcaaggtcagtctggctgctgtgttgcgcgcaggggaaagaggcagtgggtagaaacaagggaactagtcagggggctgttaagaaacacatggtagctgggtccaaagtggtgacactggaggtggtgagaagtggtcaaatagagtgtatgggagacagagcaagaggggagagaaagagagttgaaggattgctacaaggtgtttggcctgagcaacttagaaggatgaattgccattaattgggatgtaaagagctatggaaagagctttgaaaggtcactttttccatttttgacatgttagattaggaaatgagcctggagttatagaaggtctgggttgcaccacttaaaattttgaatttatcagccgatagagttatattaacccatgaaacagatgatatcactaaacaaatttagacatatgctcttcaacatttttagagactaaatgtggaagatgacgaagaaaaaccaaaagaaaacttgatgggggcccagagaaataagggtataccaagagactggtgccctggaatccaagtgcagaaagtactttgagaaggcagtaatcacctgtgtcctgaagtaaagccagagaagcacctttggatttaggaatctagagattatttttgaccttgataagagcagtttcagtggagttgaggggtgagagcctgactagagtggcttcattaaagaatgggaggagagatactggaaactgctgtgtagacagcactttcaaatttttgctttagaggggaggcaaaaaatggggtgggacctgtggtaagtggatcctgagaaggtcattggtttgtttgatgggagaacttctagcatattcatagactgaccttcctgtgtctatctggggattagatgcttaaatactgacagagatcttgtgggaacaggagttttgactggaagtaaagattgtgtaaacagatcattttggattatggggtctcctggaaatgccagcactgcagtaggtggcatgaggacactggcatcatagaaggagactggagggcagaccagaaggagagagaaggcagcagaggaggaatcatccaatccaacattgcctgtttgtattgtgtagggtgtgggttactgcagcccctgaggtgtcagtggaagttcttctgcatgccatacaagtttactctaagcgaaaccttaacacaaaagctttttaaatagaattccttctttcatgttcagcgcatctctgtgggaaagataactttgaatgggtttaaaggcaaggagggaaggccatttccatgcactagattctttaaaaaccagcatgcattctgttgagggactagaacagtggtttatgttaattaatgagtctctgtaacactgtcttctggggagtctgctaccgaggaatgtaggtgttcagatgactgaagtaatttagttaacaaggacctgcaacatatgatttaaaccagttatcaatgttgaaacaagcattaagtctgtgtatattgtagatgttgagatgaagactggatgcagagtctctgttcagcaagcaaccatgggagccatgacaggtcaggagctggtcctcttcttcccaggagtacagactttttcatccattcaccataactaggtgctaattgggaaacagtctaagcaattgattttaatcaaagagcttatgagatttggggagcatcaggtcttactattatcatcttcaagaaaagttacgttttgcctgtgtctccaaaaagtggaattcacattctttagggtataacacgctaatggacaaattacagacagtagacagtcttcattgtagcctctctttttacagctttctttttggaaaacagctacagtataggaaaatactttctctggattgaaaattaaaaagactagattccactaccagctaccatttagtcagtgaccttgggaaacaaaacttcggagctactctgttctaccatttgataaataggtataatattcttactgcatacactgtattcttatgtggataaaatgtatggaaaacagcaaagtatcttaagaaaaaatatttatcttacgagttatcacttttaagcttttgtattatacttctagttgatgttctattttttctcgtttttccagtatttaaggcacatgggttatactgagttaaggatatcatatgaaagaagagtaagatataacttagcttacactaaactgttcatagtaccaatataatatgccattgcctagttgattggtatgttaaatgttaaaatgaacattactaatatatgttagaattaatgaatacacaaaattgaagttattatataacagaaatagtgatgaaaatcacacatccaccacattaaaaagttgatttcattttccttttcaagatttaaagtgttaaactcattctggctggatgatgagaaagatatcgttctactgatttttttatactagaataatctttcattattattaatatatttaagtcttatctccaataagttcatcagtgctaccagttacaaatagaaaatgcatgtgctcaatttcaagaattaaaaataatgccttgggagtagcatttcttttctgtggcaagaggattgttggattttccaattaaagaagtctccatactggaaatgagtagtcagttatgaaaattatttttgaatggcgaatttgcatatccttaattgtattcatttcttttgaaagatcgaacttgaaatttatgatgttttgattggttaaccctgcatttctgttattaataatattgccaacagggttcccctatgactggggctctgagtgtctttcctgaataaatgcttgaatcataagtaggtttgttttacttaatgaatagaaaatatctaaagatgtactgctggttttcacatttacacacattgcactttttggaatgacagtagcatcctgtagctgcctcatttactcacatttggacttttctacatcagctgatgagaaacccttgaagtttctgaatgttggtgctgtctgttggccaaaagtgcagtttcagcagagccgtcgtcactgtctatacagtagtgtctgtgtgattacttgaatttttaaagataccttgcccttattttaaggaaaaaatgacttggaaatgaacaatttagagtttttatattaacagtaaaaagcatagttctcacgtaaaataagattgacatataattagattaaaagtaaggatgtcgagtcttattggacttagcattccattggacttaaaccagtcaacacagagtcagtcatgaaggaaaagaacaaaattaaaggcatgtacaaaaatgggatacctatttatgcaagatcagcacaaattgtatataagtattcacacaatgtatgtatgtatatatgtatgtagagtgtatctacagggacagatacaattaggcatcttgtaatgtgttttaggtctccgagactggaataacctccctatactatttaagtctattattcaatgcatattcaactttcatttttggaagcactctttaataaagagttaatgaagtcattttaggcattttagggaaggtggggtagtgggaaggggaagcagccatttcattcctttaagagagtgggccaaaattggttctatttttcagtaatagacaaaataaacaaatgaataaaccagtatttattatttcttgaccatggtgcttatagacataatattattgaaaaattaagagttgtggtatagtaacattaacattttaagtttgatgaggcgattttctttgcaaccaaataaagatcacgttcagctagatagtgtccgtgtggtatgcatgtcctacaaagtaattagtgttgttggatttgtttgtagctgattgctgtgtttgaagaacaagaaccactccacaagattgagagccccagtggaaaccctgcagatcggcagagcccagatgcttttgagacagaagtggccgcccaactggccgcatttaagccaattggtggggagattgaagtaaccccttctgctctaaaactaggtatgtgtaatgtttatgatattcttttcacctgactgaagatccgtcatcttgttgattaggcattgtttcttctttgtgactttcatcctgttaatattttatatcgtggtttatcttttctttaaattatttttttacatagctctttgcagccactgctgcttgggtaagtggatgcagctttttcttgaactgaaggtgaagcagaattgtatgccctcgaagtaacacgggggagtcagatgctaaatgatgaagtttgcctgtatcatatgagtataactttttaaaaaattcctgaaaaaaactcatttgggaaaagccaaggtttatcaaagaatccatgctagaaataaaggtcactttattttcttagcctcagtctttttctgcccaaactataatctcagaatctgggggaaatgttttgaagttagttttgaaattcttttctgatgatttattcagacaagacaattcatccagtaattttgcttagaaatatttttcattatatttgtagaatgagaaagtaaatattattctaaagtttcaatcagtttacaactccaagagaaataacatgtctgttttggtgatacctcctaaagataaatttagctcaatttaactgcatgaagtttttgaaaatccactaatatcttggtatttcaaacaactttttatgcctgtggaatgtttgtgcaacattttgagactacttagagcacctgttatgagggaattctcaagctagaagaacagaggcttattccactttgcaaaggtcagcttcttattctttttaaagcaaaacatatgcttaaaatggttagaatcgtacatagtactcattttcccatttgaaataaaatatatactgtaaagttaaatttacatactctaatgctgacaatccatattttgtactgatttttggaaaagcatctgtagtgccccttttaaaataaaccaaatggaaattaatgacctatggtctaagtgggttttcctgtatcttttggaaccgagctagtgaagcagtctgctggaacgtggctgctggagggctttgtggcagcttctcttcatctggagccagccttgtggcttcagcaaccttacagccccatcattcatttgcataatggatgcctttttatccattatgcaaatggtatgagaggaaaattaggcaataagggaagacgaaaggagaaaattgctcttgcttattttaatattctatttataagcaagcactgtggtcttcaaatggccgaacctcagagtacttctgtgccggagaatttgttttcacctctctcttatgagctttgtcagggaaaaaagattgttttcttcagcttttttgttggaatattgaaacaacataatatcgaatgcaagaaaaaaaagtcagccgagattccccttctttgaaagtgtggactgtctacttcttccatatgatttttgataagtcagagaaaacaatatttattacatgagtacacaccatctaaatcccttactcataataactcatttatttaagcctcgtcatacttaattagtcggcttttattatttttatcgtttaagagttgaggaataggtacagagaagtttagtaactcagcagaaatcccatagctattaggtggcagagccagaatttgaactgttgctggctgtggtgtgagaaaccattttgctgtgctgcctctgacatgcaattcctaaaacaaccaactaatataactgtcttggggtttactttgagaatatatgccaaaaccctgaaaatactaaactccttggtctacaatctcatttcacttagtaccagattaaatgatgagactagctcactgttaggtgggaaacattcccttccaaccatttggcctgaaaccttggcatcacctccagttccaccgtttccttctacctcccccactctgtcagctattcagcttccttgtccacagccaccacagcaggccagagctttgccatcaattagactattgcagaggcctcagactgacctctttctttacactgtgtgctttctccagtccctactgttgccagagctgcctttctaaatcacaaatctgattatgtaatataactcccctgcttaacgaccttcactggcttcccatcaccctgagaaccatatctaaactcgttagcaagctgatgcagatggttcctctgaatcagcaggagaaatttgggcaaggatgaatgacgtaaaaaaatcatcccttacccactttcatggttctagcagtttgagtactttgcatttctggaacttaaaaagcaaagaaaaaacatatttgtcaggtttttcagatagcgaagttaaagaaggaagcaacacagccagctttggtctccacccattctgttttcctgttgttggctccggggcaggatgtggccataggctgtgcacctccagatggagagatgtggttggcagtagaggcagtattgatggcacttctgggagtgtgacctggctgtcctgtctggtccaccctgaaagcctgcttaggtgaagaatgggaggggcggtgagaggagttttgcagcacctgtgccccagcagttcctcctaacagggtgctcatgaaatgtcagccattgaacccaggcccttcatctcccttccccagtcagctagtgtagccattggaactggttgtacttttcacagctcattcacccaacctggtacaagagaaatagggcttaattttttactggttttctcactcttaaggccactttcttaagaaaatagcaaatttaatcttcattggcttacattgcttttcttaattaagcagacacaattcaacaaatattaggaatcaagagatttttgtgattacatcacattgagcacccaaaatttatgtttttctggaatctgatatcaaaatatactcagtgttcagtataatttttatatttctttttccaacacaagataaccatcaacaatattctgttaaaaaccaacaaccaccttctccatgtaatgcatacagaggttgactcctcccattctttctttatcttccaggatgtaatacttatgcatgcatattcatattcccaggcccttcatgatctagctgcttcctctctgcccacctttattgctggccagtctttcacagtcaccttaacttgcagccactgtgaaccacttgccattccaaatttaccaccttcaaacctctgtgcctttgcagatactgttctctttagctggctcattcctttgtctctttactgtatagtgaactcatatgcaccttttaagttcaagctcaaatatgaccttcttcatgaagccttgtccaaatctttaaaacagtacagtaggcttacagtaagtattatttcttaattcttcatctaacaatcaagggttacaaagacgaacagcagaaatctactgacataaaggggttcatagtctcatgccctataagctgatggggtatatatttttaattcgtaagatgagttttaaatcaagtgggcaaccacataattccaacctcattcatctaaattatttcctatcatttattttctaatggattttctaatgtaatgctgaatgactgaaccctggggattcagccctaagtagcaaatcactttcacactttaagattctgtggctctgaaatcagccaaagcatgttaccatatagtacagagattgctggcctgagagttcatttaaatgatgagatgtggtaaccaaaatcccaggcgaaattggaaagaatcatattcacatgatctatttggacttaaaaatttatagttcgagaattttccaagtcttctctgtgaaaccccatggttcttctgagcatgtattagggtttcaatggatgcttgattctagttaataaataacatttattgagcgcttaagttctagatgctatttaaatttgttcattctccatctttggacaaataggattggttatgctagtgtggaagaaagggtgaagaagtctagaaagtagccaataaacagaatcccaatgcttatctaccccaaaacctcacctccactcaaaagatgtatgcatgcctcagaaaaacgtttgtgaaatgctgacctagaaatatgcagttccacagaattttataattagcaattgtgtaggtaatcgatattattttacaaatgagcaaataaaagttaaaattcaatgtgtactctgatgttgaataaggaactagaactggaacccacatttcttggcttctagaacagtgcttgttcagttgcatgactttttaaaaattaattgtagatttcaattatccatatattttaggtactatatgtgatagcacctcacatccttttggaattgagtagagtgtaaattaataaatagatactatgaataggtataaatcaaaagctactgagagaacaagaccaggaaatggaggtggagaaaatgtcttttaaatcctatacatttcagaaatgagtttgcttctgtcttcttatcttctcatcccgtgtgtgtgtgtgtgtgtttgtatgtgtaggaaagttccactaaaaccaatatactaatgggatccatagatgtggggttttttttaataacgtggatattttaatagactttctgattttttaagtatgtacatatagggccatctgtaaaaaagacaaattagtgaggaaaattattttgaagtttaggagggtgggagtctcccggtccttcccctgactagtccctacactgccttcatgattagtacctgaccacctactgttccataagaggctttttgtggccatagatcaaggttggcccaacccaatctttgtcccttgagagtcagtgatatggagctagttctagaccctgcagtatttgatctagctgtgtgatcaggataagtcatttaacctatctctatcagaaccaactttttccaaacaaaaaataaatcaggacaaatttgggacacattctagcaaagtaaaaattgaaaaccaaggctatccaggtcactccctgatgtgtcaccaccatatctccctgggccacagtttcctcatctataaaataagctgtcctttctccaatgggccatgatggttccttgagtgttttattaataccaagctgagtttgaatccaactccatgcctctgccaatttccctgctatggccccaattaattagtagttttttattttgtaccttttgataatttttttcagtacttcttgattgaaatttgctaatttgggttcaagctttcatgggaaaatatttatttagttaaattattttagcaatgtaatttaaatagtttttcaggataaaaagtactttaaacttggctgttaccatgcttgtgatctagattaccttgatataaagtaatctaagtttggagttgaagtggtattagctttattctcctcttgtgtgttaaactttgaagatgagctactttctatttgaaagtgattcttgtttttgagacttgaaagctgaaaggtgcctcagatgctttattgtttccatgtgtgtttgtgattcttcaaaaccgaaatggaaattatgattatgtgtttgttataatatcattattttcaaaacactgagttctctttctttgcagtggtgttcagcaaatactgtgtagctatagattcctgttgaaaattgtgaccattttctatctgattttgactaatttactgcataaaggaaacatatgggaacatttttctcaatttttaagcaaaccaaatccctttatggcgctgatcttcaggaaaacgtaaagaaaggggaagtttattcctttaattaggctgctgtgtgtaagtagctgctgtgcccataatgtgagtttaagtattggcatctgatcctagacaaacacactcacaccacacacatagcagaactaaagctcagggatgggttatgcttctgatgaagcctttgaattctgactacaaagcatataagcatgtgagggttccttgttgttggaagctctttgctgtaggctgtgaaacccagagttaaaattacccagagttaaaattgcgtagatgaattcataagttacaatttggtcattgagtttcatcctgtttgtttcctgttgaggctgattattcaaaagttagcagttatagaatagtttttctttctttttttttcctttccttccctgggagtctgttttttttttccccctccatgaaggcttaaatgaataatgttgtaattagctatggtaaccttgctagggtgtcatcaatcagtcatagccatatagtcaacaaagtgtgtgcttgctttctggtgtgactataactaaatcaggactaaggaggctatagtgtttctaacccattttgagcaccactcttttgctactgttgttttgttttaatttttttttttttttttttgtagcaatgggtcttgctatgttgctcaggctgatcatgaactcctggcctcaagcagtcctcttcctcagcctcccaaagcatgagccaccacgccttggctgttttgatttttattttagattttgttttcagagtagtgaaaaagtagctctgtggaagaatgtcacgttattcattgaatatttaaaattaatactttgtaaaagggccagtggtactagttaaagaataaagtcaatacctaaagacaagtagcccctaaaaaatattaaaaggtaattaccatatgggagtaatttttgtttgtattgagtaaaactatgagcaatattttaaatatacaattttgaatatgcctggcattacctccttttgcagatgaatatatataggcctcatagttgatcacttcctaccattttgttaaaataaaatgatgaagtttgcttgagaacatgctatagttttataaatgcattttaaatgagatattacttattaaaattatatagtgttacacttcagaaaaataaaaattaccaccatcctaacagaacttgtattttcatttttttgttttatattcagttaacttttgtattttagtcttatttcaattttctttttttttctacctgcttcagttacccttttgtctctttaattttgtgtgctatatctgatggctaagtttagcagttaaatttatactaagttggttgtactcaaataaaatagaaaattattaaaaggaatttacatgtaaccatttaaccaaaaatataagacagtacataaaaccaagctctcatttttgtcctttttccagctgtattttctaagttgattatgtgacctctaaaaaaacagagttcaccatctcccctttggcctcttaccaatgctggacccacactgagacggagtctgcagatcctctaataaacaaacggaatgaaaggtcacctttcctaccattcacttgatattagacccctgggtttttaagcctcttttgcagattgcttttaatagtaagtccagtgaagtcatgtttgcagaggcctagtccctaagtagtaaaaatattttcagcactgctgtcatattcagcttcttgtagttcccctgaccactgataaaatgatttgcagtttgtccttttaataaaggggaggaaaaaaaccaagccatgcacctctggcctcttccccatgcccccaccagtaaaaccaccatcgtcctcccttgcagccagtccccagctcgctctcttctgtttcaggcactctgaggcagccgaaacacagccacacagaattgccctctgttctctaaatacaagtactgcttttcacagcctaataaggtttaacatgtctattacaaaatgcctttaaattacttatctgtattaaaaaatttgttgaagttatgactcagattttttatttatacatattcatctttgtggccatgaaatagattacattttctcacaaatttctaatcattcctaaataaattatttatagtaaccatgctgattttcttttgcagtttgcaattcaggaatcttgttaacaatttaatatatggtaaagccctttttgtactgacaatgtaaatgtaatgtttagcctttaagattttttttttctctctgagtgtgtatgtgtgattttttaaaattttctttccacccagatgggcaggcaaaaaaaaaaaaaatccactaatttaattatttacagaagatccatcttaaggacaagtcactcagagttggacacgctttcgtgactggctcaggattttctcatttgctttatctgataaagccttatgatgaattatgccccaatatatacacatttggttatttactttttctgtatcttatttgaaattttgctaagatctttatttggcccagtgaaagtaggaaatactgaaacagcttgatctgttcattctcacaccccaaagtgataaggaaaggtgacagcctttgcttagcagtgaccataagagaagccatctctattttgcttaccccttttttgttaaatgtttaccagataaaagacaaagacctcccagatatcaccaccacaccctgtcaatttatctttgaaacaatgtattcatcatatgatacacagaaaacggtgctcattctgtttattcattggcttaatgggaaaatgttgatcgctatcagaaaataccagtaactttctaaaaatatcagaataaattctgattactaatctgtataaatatgagactgtctgccagattcttcaaacatctttacagatggaagaaatttggaactttggggggttttggtgtgtaaaattagaggaaaggaaattatgtggtacatcttattttctttattttctttttgtttatatggaagacttgactatggttatgtaatgtatgtttgtagaatacggtgtgatcggggaaaatgggtaggcttattaccttatcacaacctatttaaaatcataacacttatatttggtgttttaagataatatttactaaaataagccgtaacttcaatgtccattttgttttaaactgttggaaagaaagttgtttttatatttttttatactatttggcctaaaacatggcatagatagcaacaaactgaatggccttgtgtcatttggttctgtataattgtgatgatcaattaaacttactagtgtttttaaaacaaatagactttttaccccagagatctgaaagcatgaggaaaacttcttgttttagtcacagttcagggataatgtcctttgacctcaagactttagcttggtgttacagtgaactgcccttacggcagagttcagcatttgctcagctaacatctgctctttttagatgattggtcttaacgatacagttatgaaaatcagtatatcaagtgtcaatgccagagaaaatggtggcatgcctgtcactcccttcagttaatcaataattatttattgataacccagtagattaaaagcattgtgctaggctaccaaaggaatataaaataatacacatcacagattcattcccaagtagcttgcaatcaagttgacttaaaataaattactggatgagtctcttaacttggctaggattccaagccaagttatatatttttatcatatataacgattgttctaatattatggggtacacagttatcaaaccttatactgaagatcttacctcataataaattcagatgctcacagactcttcatgtgtaccattagtcagtatgtgatgtttcccatagcttggttaattgcttgtcttttactttggtcttcagttgatggggaggttcaaggtattcataaaattttaactttttagtctttgattcgacagtcttcattgactcactagtttggccaactttaattttatcttctattaagcaattaaaaataactaaggtctcaagtctctccatgactaccaacaatgtccgctactccccggacacgatctgcaaggacctaatgggttggtggataaatgtctatgcatccatccatccatccttctccctgaagacactccagtcagatgtactcttttaacggtaggtggttaatatagagacaagccttctacccaaatgagttcagcaggtgcactgtttagaagaatgtgttgtgcctagtctggacgtacttcttacctccttgtgttattttttcactgagtactgtgtaaattactgattggaaacccattgatgatcttttctctaaagctgtaggctgtacctcagactaatttattagcatgctattgagtggtttaagcaaatttcattttcagtccctctattctgacacaaaataccattttccagttgaatgtcaaaatagtgtaaacataattgccctatatgtaaacttatctgtgttaaggggtgaattgagaaggagcaacttggccatcttggaaaatggtctttgagaagtttggagaatgcatttagtgtctttttctcttttcagacaattcattacctttaaaaacttaaatttatttaaagtaccttccttgactgccttgttgccctgtttttaaaaaataatgtttagcatttgtttgatagttgccacaaacttgatgctgtaatattctgactttataataaggtgaagagttatgcgaggttaggcaaaattttcatctctaattcgtctcttgttaaaattaggcttttatcttagtacccaaaatattgtactttatatcttctctgatatcttgatgaagcaagtaggcaatggaatgtttccaaaagaaataaggatggagaaatacatagattatacaatcttacatatttacagcagtgtagtgtagaaattaagagcacaagccctggagcaagcctgcctgggtcaaatatggcactgcaacttacaagctgcatgattttcggcaagttacttaagccactgagtctgtttcctcacctataaaacaagggtaatattacctaattggatagtgacctaattggatagtcgcaagcagtgaatgaattcatacatatatgtacatgtaaaacacagagaatactgtctgccacataataggtggtatataaatctgctagtcactgttaatttcattattatatttattatggatcatttggaggaaaaaataaaaaaactccatgtatttaggtaattgattttttttttttttttttttttgagatggagtcttgctatgtggcccaggttggagtgcagtggtgtgatctcagctcactgcaacctccacccctggactctagcaattcttctacctcagcctcctgagtagctgggactagaggtgcgggccatcacacccagctaattttcgtattttttttagtagagacggggtttcaccgtgttggtcaggctggtctcgaactcctgacctcaagtgatccacccacctctgcctcccaaagtgctgggattacaggggtgagccagtcccacctagccatgcaactgatattttgatctggtcttttgttatccctttattccactttcaactttcaacccataagatcatgttctctctttttcacgaatttagattctggttgtcttatgccttctcctaaaccataaaattaaattttggtttttctctcttcagacttataagttaaatgctaaaatggcttattgaagccaaaacagtagccagggacattaatcagaatagtataattaccacaaaggtttcaaataatgccttcgtgcttgtttttagagattcatagaagggtaattgctttgatcttttttatcttcaactcaagtatttacttttatgtcctcacccttaactcggcatatggttcacaagaattttcttttacaattggtaagtgcatgctgtctatgtttgacagtccatttttacagggaataggaatttgtttttaatgttgttctcctccctcaactgacccagaacactgtattagccagggtgccaacaggaaacggcatactcaaaggtgtgtttagagagaatttcaaataaaaagattataggtatttcagaaaatgagacacccatgttctgaaaagaatagggagccttggtaggccgggcgcggtggctcacgcctgtaatcccagcactctgggaggcctaggcgggtggatcacgaggtcaggagatcgagaccatcctggctaacacggtgaaaccccgtctccgctaaaaatacaaaaaaaaattctctgggcatggtggcgggcgcctgtagtcccagctactcgggaggctgaggcaggagaatggcgtgagcccgggaggcggagcttgcagtgagccgagatggcgccactgcactccagcctgggtgacagagcgagactccggctcaaaaaaaaaaaaaaaaaaaaaaagaatagggagcctttaccagctaaggcctgaaaggggaaagaggagaaaattcttacatatctgatgagggctccagatgttggggagaggcccttagaggatcaaaatctgcaacctatggatggcaagtgcagccactttcaaagctgaagctggcagagagagaacagaacagataaacaccccaagattcctctcttcctacccactggtctcctgctgatccttcctgatggctacattcaaaaggcagccagagggaaaatggtcttcagaaggcactgagccactgaattagagcagcctccagggggccagaacagggcatagaagactggggagtggcattggagagagtaaccaacacaaacatctagtctgtgtgtctctgaggtgagatttttctacagcgctgttttttattaaaattatatagtgttacacagatcaataatgcttttaaaattagccaacagataattattaatgtctattaggcatggagtatctctattggaatataaaaattagtaaaatgcagtttttccctcaaggtgttcacaattctgtgcaacagttctcaccccttttctatttgtattcagacataacatgggtgttattaataaacacaatatgtcagtagggcagtagtcatctttttgtgatattcatgtgcacaaaagttgtacctacctttaggtaatattcctgttttggtgactataattccaccaactttattgctcagtaaagcacatcagctttcagcttgcaaaagtggattgaatgcacttcttttttgcctcctcctttcccaacattcataaaaatgacagattttggctgtgcatggtgtctcatgcctgtaatcctagcattctgggaggctgaagtgggaggatcacctgaggtcaggagtttgagaccagcttggccaacatggcaaaactctgtctctactaaaaatataaaaatattagccaggcatggtggtgggcacctgtaatcccagctactcaggaggctaaggcaagagaattgcttgaaccagggaggcagaagttgcagtgaacagagatcacaccactgcactccagcctggagagacaaaatgagaccctggcctcaaaaaaaaaaaaaaaaaaaaagacagttttaatgtaaaaataaaggaggtggagttagatggataaaatcactggaaatgaatacaaaaaattagccgggcgtggtggcgggcgcctttagtcccacctacttgggaggctgaggcaggagaatggcgtgaacctgggaggcggagcttgcagtgagccgagattgcaccactgcagtccagcctaggcgacagagcgagactctgtctcaaaaaaaaaaaaaatcactggaaatgggaggagaaaatggagagtaaataaaatcagatcaacagatgattcaatctttagactgccctagagtaaaggctgggatgaaggcgggcaaccagcctgtctgtctgccttctgtgtgtgcttttaagacgagacctgccaatgaacatgctttatcatgtcaaccacctaattcagtggagagtttatttcaggaaagacccatatattggcaggaacaactgaagctatttgttgttaatcaactgaataagaatatgaatatactcattcatttatattcaggaatatgaatggacagccactactcaccagacaatatatggaaaacaacaagtcaaagataaggacagtgtagaattgacaagacagtcttgaagaatagcaaagcttaccttaacagatatgtataaaggtatagaaactgattcagtgtaattttggcacaagaacagaacaatggagtagaatagaaattatagcaatagcccctcacagatataatcatttggcttacatcatatttggtattgctggtcaattcaatatctatatagaaaaaaatttaatatccctacctcacactatatacaaaaatcagtgctagacagattatagatctaaaggtaaattaataacaaaacaagcaaaaaacaatgagagacaatgtataagactatcttcataactttggtgttaggcttgtttctaaaacagaacacaaaaagtgatagccatgggaaaaattttgataaattgggttatgtgcaataaagaacttctgttcattaaaagactgaaaagaaaagccatagattctatgaagaaattttaacacatctgtctgacaaaggatagtgtacaggatacataaataactcctaaaagtcataagaggaaagcatcctgctcaatagaaaaataggaaagaaccctaacaggcacttcataaaatggccagtagatttatataaaggtgttcaacttcatcaatcgtgacagaaaagcacattaaaaccacattgcaaatttcagcaacaaaataaacaatgtagtatttgtttataacccaacatataaagtaaatttgcatgagcccatactgatataagtgattgtttgagtaaataaaactagtagtgcttagaggtaagggtaggagttgacaaatctttctagtagaattccaaataatatatatagatagtactttcaccttgagtatgggatgaacttgatgacttacttccaaagaataggatactgaaaaagaaaatgagtgaatccacagtagagaaacctggcaagcactgtttgaaccaagtgatcaagattattatctccaggcataattcagctgataccatgtagtctgaaaatgatgtgatgagcagggcatttcacctcaatggtattcttcctccaaatccatacccccaggctaatcatgagaagaacatcaaacaagcccaaattgaggaacattttacaaaatacctgacaagtcctcttcacaaagtcaaggtcatgaacaacaaggaaagattgaaaaactgttccagaccagaagagactgagaagacttgatgactaaatacagtatggtatcctaaactggatcctggaacagaaaaggtcattcgtggaaaagctggtgaaatccaaaggaaatctgtagccttgttaatagtaatgtataaatgttaaattagttttgacatacataccatagttacataagatgttaacataggggaaactcgattctttttatactatctttgcaagttataaattaattcaaaaggaaaagttggttaatacaaggccactataaattcatcagaaattactaaaatgaaagaataccagctcttggtgagcctgtgaagtaactaaacctcatacattgttggaaaactgtttgagtatccactgaaattgaaactgtacatgtcctatgactctgccatttcagtcctaggtaacctaggtaattctcaacagaaacgagcgtgtatattcactgaaaaaaaaatagaacagcatccctattcatatcaatctcaaattggaaacaacctaaatgtccatctttggtaaaataataaactgtggtgtatgcatacaatggaatactttacaacagtgagattaaactattacaatagcaatagcaagaaaaacccttagaataatttcataaaatagaaggtgtaaggagttaattccctctttcccagtggggcaatatacatctgccttaagttggtgggccaagcatatgtggctataaaaaaattaaaatgacaatctaaaattcatgcattaagcaaatatttattggacacttaactatctaccaggcacttttgtaggtgctgggaatgtagcagtaaacaacaaaaagattaaaactttctattctcatttagtttatacactagtgtgagaagacagtaaccataataaatgagatttttatatagtatgttagaaactgataaaaagttttgggagaacactaaaacatggtcaggagagtagggtgtctgatgacaagaacgaggagtctaatgttaaacagggtggcatttgaggaaaactggaagggagttggggagtgagtagtgcagattggttagaggagagaggaagggaattttgagaaaaattcttcatcttttttagcagggagtctatcaatgctatttaaagttcaaaaaaatcaagacattgtgtgtgtgtatgtacacacacacatatatatgtatataaatcttggagttatgtaaccaccaaaaaagtcaaaaatagaagtgctacaaaaagacaacttctggtaagttgagcctgtcagtgaaagggagacttttattttttatttttatatttccttccttctgcaaggtttgaattgttttgaaaatcacattttaaatggtcacattaggacacaagtaggccaggaaggagtgacattattaggtagagaaccttgaaaccactgtaattatatcttgaaaagataaatcatttgcacaatttagtgcttattattgatgaggaatttcttgtaagattgctgtcagctgcttcaaggagctactcaccctgttttctccaactcacagacgaccaagttctgtggatcaggcatgggtgtggcctagaccagctcagagcacagctgcaaagtctccccagatcctccccaagttaagcacacaagtacaggggcttggccacatgctgcagccaccagttcacactgattctgatagctctctttcttgccccactaatccacataacaatatgttgtccatattgctttgcagcatcgtgaaagtgctgactcatgtttcacaccagtaccaactcactctaacactcacaatctttcagctcaagctaaaagattttaattaggtatatggtgacacaaaacaagtgttctaattaaatttttgaaatgagtaaggaactgtaacattgcccctagataatggataaaagttcagtattaaatagactgcatgtactcacgcttaaattggtatagatgtaaaaaagaattagtcattgtatctgataaaaagtaatctattttatgaatttgtagtatactctgtagagcttgtcttttttgtctgattttacttgaggggaatatttcaaattgcatatatctgaaaggagaacgaatataattacctaaatctagaacaactaaaaatacttcagctaaagtatacaaataattggagtgctttttgtcttggttttctcggattatctggatgattgcctccattttctacctgatttagtgctttctacctgattgagtatttttcaggaggttgttactgctgttttcttagctcggtgacctgaagcattgattctgtgaactgttggtatagccaatgcagtttgggttgtccaactggtaattgggcctgataatttgcagacattatgtaggagtttctttatttggtagtttcattctcaaaaaaattggtgttattaagccttgagtaaatatagttgttaactctgcattgtggtcctaaccaacttataacaactgacatttatgaaggttccaaccgaggctttaataaacaatgcatccaaaaatgtaagcatggtggctgtggggggagtcgggagaggaaggggggaggagagaagtcagtttaaggaaagttagaaaaaaaagacaacatttgatattaaatttaatgtatttagttgagaattaagaggaaacagttcagcctgtgtggaggaaatcttcatgcattttattacctgtgaaggagttaaaaatataccaacctgccatattgactattgaagttaaagggcacttgaaaaacaccaggtgcaaaaagatgactctgaccttcgttccgtttcttaaaagcagaagatgaaattcccatgtgaaagatgccctccatatacttgcaagacacaacatccttatccttaggatcagaagttgtaaccaagagaatttagtatagacattgtaaaataactcttttaagcctctccacataacatagttgcattttcacagcttactattatttgtccaattcagtatataagtaactgactctaaccccttctttgggtcttcgtttccttatgagggctcctgtgcatataaaacttgtattgaagttgtatgtcagtacccgtcccctcctctgtatggaccttccttgtcgcctctctaaaaagaaaaaaaaatatgcatttctcctgttcatctgttttatatctatctaattctcagatccagccaaatactaagagaatagaggtggagttttgccttccctgcatctataaaacatctaaatcaaaattatatatatatttaatatatgataaaattttcacagtaatttcatggtcaaattagcaaaagaattaataaaatatacatttctctttaaaaggtctcaacttacattattggacaaatactagtaaattgctgtctgtaatagtcaagatttttcaatcttctcaatagtcagttgagactaatcaaaatagtttttacgtgtagtttggatgtggaaatgctaccactttatcactgaaattgctggagtttcatattgaaggtggaatgcacttaaaatggggtaacacacaagggaaaatttggcaaaatgatttcatggagtttcagatttaggccagtgatagccagggcccttaggagaagtagatgtttcccttttgtatttaatatgaataacattaatattaaaataaatgtatgtgtattcctttgtattcacaaaggaatgttattggatgtgtgagttgtcagttattctgggagatgtttaattcagtagcaggaaatggagcggccctggaatttgtaggaggggctttctcctctttgaggagccagatgtcatggttaggaggagaagggccatttttgcattgcatgtgtgagactggaatccccattttcacccactttaggcacttagatatgggattaatggtgcagatccatcaactaagagccctgtgtgaataccgagcttaagtctggcagaaggaatgtgaagcagtcctggaataatcatcaggaaagaattactgctcacctttgttccactgcccacccccccgcaccccaccccagatgacttcaaggtatcttaattcagcaagtgttcaagcaagtcattcagtacagccccagctctcacaaaatcttctctaccacgtttggcacgtctaataatgattataggcattgctacaaattcaatggtaatattgtaggctaccaggttagagacctctctaacttagtctgtctctttctcttctttccatttctcctcctttttcttccccttttccttcccccacttctttccttacatcctccttccttccctcctgcctgttttttccctccctttaactatctctctctactttccttccttgaacaattaaaggaatgcattaaagcccaaacaacaaaactgattaactcttaatgcttatctttctgaggaatgataatctatatgaacttgacaccaagactaaaagcttaagtggttgagtggatactaccaatatcaaaggggagaatgtcttctgtggaagataaatatttcaaaattggctatatcagaatgtgtgaggccataagctccaggaaacatacagttctaacacttttctggaaaaacaaagaggagaaaatgtcataatgtttatgttcttgccatgcaccacacacatgaacgtggctggaatttgaccaaatggacagagggtcttactgaaaccgaactgagcatctgccgccctgacttcttcagtggcagagggcccacctcagccacagttgttatatgtgaaaagccactggaaagaagtggagacaattgatgaagccccgtgtaccaagctggtttcatatggggggaagatctggtgagggttggggtgatgtgtacagaatagacaaaggagaaggggagaaacatctggattgtattgaaaaaggcttagctaggcgtggtggctcacatctgtaatcccagcactttaggaggccgaggtgggtggattgcctgagctcaggagctcgagaccagcctggcaacatggtgaaaccccgtctctactaaaaatacaaaaagttagccgggcgtgatggcaggcgcctgtagccccagctactcaggaggctgaggcaggagaattgcttgaatccgggaggtggagcttgcagtgagccgagatagtgccattgcattccagcctggacaacagagcgagactctgtctccaaaaaaaaaaaaaaaaaaaaaaaaagagcttatctgggcccatatgctagggactttcttgggtatggcagatctctgtcatcttttgattggatccctttacttcacttagacctgtgtgtcacctttgctgactgcaaggaaagctcagggcctgccagtatgtaacccaacagttgtatcaaaagcacatagggcataacaatatccaagtaagtttctgaattatccttcttcaaaacatgtctatacgactatgaagtgttatcgacagagcatatcaaccctaaactgtgatttgtctcagcaatggcagttactgatttgtaataatcagtactttacctagtttaaatcataatctctccttgagctcttaaatccacttttgtaatccatcaaactaaatgtaaatccctcagatggtgacatccaacaactagttattgtctttagccagtttatatttttaacgtacgcaattaatactatatatgcctgttagcattccaagatgatttttagatttcacagatgaggattgttcagagtttctcagtcttttctgtgaagtttaaaaaatctctttggcaaaaattcctaatgtgatagcagctagaagagtaattttcattggaatgaccttttcgatgggtaatttgacagacgcttgatggacagcattcttccatctctcagcccaccttttacgtcctgccataaaacgctggagcaaaattttacctcagctgataagattctcaatagtcatgtgttgcatatctccctcagagcagttcctcaaattttgaaagctgtctttctttttgaggtatttttcattaccaggagaaaatgtttcttttagggagatattctaaaacaatagcacaggtactgaacaaacttcccaagtgtctaagggactctctcgtgtggctgtatagtattggtttggtgtattaaatggcactctcatgtactataagagttaacacaacttccaaaggtgcctttcctcacaataagagaacagatttgactttggaaaaaaaatgtgactatgaagtacccagttaaaataccctaaaagaaaaaaatgaaagcacttactggtaaaatgaagacaatcaacttgcaaataaatgtgtttttaagatgtggccctggggtgacatgcaaattcaaaagactaatattttctctgggaataaaacattttggaagatattttatcttgaattctgaaaatattgccagaatagaatgcttgttgattgataaaatatgtgctttcatgaagaatatttcttatggtattacctttgtcaaagaaaagattctgtagtttggggagataaattataaagatgatacatacttatttgtgtatgtgtttgtctgtcttctctttctagaaggtatgttgatgaactcagatcatcatctcttttgtccactgttgtatctgtagtccctggcacaatgcctggtgtgtagtggtcagtcaataattatttgctgaatgaatgcataaacaaatcaaattaacaaattaaactctagattttcatcttcttcagaattttttttttcagtgttccaagactaaggacttttcattgtctttcaagttgggatcttaatcttatttactgcttttcatacaacaaacgtgttaaacatgtatcagaaaaaattagaaacattatctgtgattcttatatagggaggtgatttcattccattagctttttggggggaattcatgggtttgtcactctgttaatccagctgacaagcagaatccaaagggtgacagttagaaggctggaagggaaagggattgttgatgtggaaatgaaaaatagacttcagggaaagaggtagttagatgaaaatatggcaaaagagagagagagagaaacacctagagtccagtgggggtcatcacattgcaggaggaggatgagggcatgaagggggtccttggagaagttctggagagaaaaaagctgagacaaaaaggagatgaagttatggtcaagccagagaagacattggattagcactgcatgcatgataaaccagccatgctactagtataattctgacattttggaaatattgaaatcctacatgaagaataaatggtgtctgtattttctcagacaatgaatttgttcaaaacaattgaactcatggacatagagagtagaagaatggttaccagaggctgagaaggtagtggggggcatgtggaggacaggtggggatggttaatggtataaaaaatagaatgaataagacatagaatgactatgacacacaacatggtgactatagtcaataataatgtaattgtacatttcaaaataactaaaagattgtaattgtttgtaacacaaaggataaatacttgagggggtggataccccattctccatgatgtgcttatttcatattacatacctgtatcaaaacatctcatgtactccataaatatatatacctattgtgtacccacaataattaaaaataaaaataaatgaatttgtgacctaaataagtatgcatgacagaaaaagagaactttgttcaaaaattttagatttggaaattgttcttcatatcatactcctgaactgacttagtttccactcacatttaaaataactgaaaaagagaaatgagagaaatttacaagaaatggtgtgcccatattatagggtgacagttaaatgctgtccacgccctgacaccacacacccaaagaagattagatctatttaacaatgaaaagaatggactgctacaaaaagaaatacgttcatctctttgttcttgcattaaatgagaaatatttatcaggtactgttcatgttctaggcactgggtggtaaacctccagcagtgcacaagatagcagtggtctttgctgtcaccaagtgtactgcctagtataggaagtaatcacaaaaacagtttaaatgtaatgttaaggggggtacaggctacagtcagcactcagggcagtgtccctttacctaagaaaggagctggggagggtaagttcaaggacgatttttcaaaggaagtgagggattgaccaggcaagtggaaatggaaagaatatttctaggattgcatgctcaggaaaaagaaaaaagccaagtatgactgccataaggaatgtaaggtagggaaaaattgggagagaagtatggtgagatttttctggaaaccaggatggaaccagaactggaagcacttacatagccaaggtaaggagccaggacattttactagaggccagcgaaaggatttatttttaaattaaatattgaatttgagagttttctaaaactgtggtatgtatgaagagaagcaacgcagtgagcacccatgtaactaacacctgatttgagaaactgggctgtcattatctttgaagtcccctctgtaccccttgctaattccatctatttcacttttctgtggaataatcattcctttgcttttctttataattttaccatgaattttcatatctctatggagttcattgtttagttttgtgtgattttgagctttataaatggaagtatactgaaaattttttctgtacctttttctccttaatattgcactcctaaggagtatcatgttgttgaatgtagcccattatccattcatttcattgcagtatagtttccttttttaaaaaaatggatatttgcattatttccaggtttttgctcttacatgcagcataactataaaccaccttcttcacatagtcaatgaacatataacaattttctctaggtaaatatacttagaatgaaattgtttgtttatagaatatattacttttgaaatatattagataatgccaaattgcttcccacagtaattttactaattctttaaactactaaatgtaaaatagaattccagtttttacatggtcagcaaaacaatatagctagattttaaattttcgccaattttatggatatgaaatatttcattgtgattgagctcaagcatattttaatgtaattattgaccattcagatttactcttctgtgatgttcctggtaagatttttgacaatttttttactcattgatttgcaggaactctttaaaaacatttttttttttttactgataataattgtacgtatttttggagtacatgtgatatttgatatatgcatacaatgcataatgatcacttcaggattattagcgtatcacctcaaacatatcatgtttctttgtgttgggaacattttgaatattctcttttagctatcttgaaatatacaacaaattattgttaactatagtcaccgtaccatgctgttgaacactagaactaattgtatgttgatacccattaacaaacctttctttctccctcccactttccagactctagtaactatcattctactctctgattcacaggaattatttacatattaagaacactaataatttgtagattgtatctgtctgtgtgtgtatgtgtgtgtgtgtatgctacaaatatcttgccccagttaatgacttgtcttctcttcctgtatgttttttgatgaccaggaattgttgattttaatagagtcaacatttttatgtttgaatattttgtatcttatttaagaaatctttccctacctaaagccatagagagactcttctactttatataaaagtttcataattttgtctgtttaaaagtttactttacataggataactttttattttagcatatggtgtgagataggggtacagcttttccaccatacacgtgatcaattgtcaggcatcatttattataaagcctgtcatttctctacaggaacacacagctattataattctgtgaaattcaaatgtcttagtatttctgtgtctgcttctggatgctctaaactatttcagttgtcattctttttttttttttattatacttatataagttttagggtacatgtgcacattgtgcaggttagttacatatgtatacatgtgccatgctggtgcgctgcacccactaacgcatcatctagcattaggtatatctcccaatgctatccctcccccctccccccaacccaccacagtccccagagtgtgatattccccttcctgtgtccatgtgatctcattgttcaattcccacctatgagtgagaatatgcggtgtttggttttttgttcttgcgatagtttactgagaatgatgttttccaatttcatccatgtccctacaaaggacatgaactcatcattttttatggctgcatagtattccatggtgtatatgtgccacattttcttaatccagtctatcattgttggacatttggcttggttccaagtctttgctattgtgaataatgccgcaataaacatacgtgtgcatgtgtctttatagcagcatgatttatagtcctttgggtatatacccagtaatgggatggctgggtcaaatggtatttctagttctagatccctgaggaatcgccacaccgacttccacaatggttgaactagtttacagtcccaccaacagtgtaaaagtgttcctatttctccacatcctctccagcacctgtggtttcctgactttttaatgattgccattctaactggtgtgagatggtatctcatagtggttttgatttgcatttctctgatggccagtgatgatgagcattttttcatgcgttttttggctgcataaatgtcttcttttgagacgtgtctgttcatgtccttcacccactttttgatggggttgtttgtttttttcttgtaaatttgttggagttcattgtagattctggatattagccctttgtcagatgagtaggttgcaaaaattttctcccatgttgtaggttgcctgtttactctgatggtagtttcttttgctgtgcagaagctctttagtttaattagatcccatttgtcaattttggcttttgttgccattgcttttggtgttttggacatgaagtctttgcccacgcctatgtcctgaatggtaatgcctaggttttcttctagggtttttatggttttaggtctaacgtttaaatctttaatccatcttgaattgatttttgtataaggtgtaaggaagggatccagtttcagctttctacatatggctagccagttttcccagcaccatttattaaatacggaatcctttccccattgcttgtttttctcaggtttgtcaaagatcagatagttgtaggtacgtggcgttatttctgagggctctgttctgttccattgatctatatctctgttttggtaccagtaccatgctgttttggttactgtagccttgtagtatagtttgaagtcaagtagtgtgatgcctccagctttgttcttttggcttaggattgccttggcgatgcgggctcttttttggttccatatgaactttaaagtagttttttccaattctgtgaagaaagtcattggtagcttgatggggatggcattgaatctgtaaattaccttgggcagtatggccattttcacgatattgattcttcctacccatgagcatggaatgttcttccatttgtttgtgtcctcttttatttccttgagcagtggtttgtagttctccttgaagaggtccttcccatcccttgtaagttggattcctaggtattttattctctttgaagcaattgtgaatgggagttcactcatgatttggctctctgtttgtctgttggtgctgtataagaatgcctgtgatttttgtacattgattttgtatcctgagactttgctgaagttgcttatcagcttaaggagattttgggctgagacgatggggttttctagataaacaatcatgtcgtctgcaaacagggacaatttgacttcctcttttcctaattgaataccctttatttccttctcctgcctgattgccctggccagaacttccaacactatgttgaataggagtggtgagagagggcatccctgtcttgtgccagttttcaaagggaatgcttccagtttttgcccattcagtatgatattggctgtgggtctgtcatagatagctcttattattttgaaatacgtcccatcaatgcctaatttattgagagtttttagcatgaagggttgttgaattttgtcaaaggctttttctgcatctattgagataatcatgtggtttttgtctttggctctgtttatatgctggattacatttattgatttgcgtatattgaaccagccttgcatcccagggatgaagcccacttgatcatggtggataagctttttgatgtgccgctggattcgttttgccagtattttattgaggatttttgcatcaatgtttatcaaggatattggtctaaaattctcttttttggttgtgtctctgcctggctttggtatcagaatgatgctggcctcataaaatgagttagggaggattccctctttttctattgattggaatagtttcagaaggaatggtaccagttcctccttgtacctctggtagaattcggctgtgaatccatctggtcctggactctttttggttggtaaactattgattatcgccacaatttcagctcctgttattggtctattcagagattcaacttcttcctggtttagtcttgggagattgtatgtgtcgaggaatgtattcatttcttctagattttctagtttatttgcgtagaggtgtttgtagtattctctgatggtagtttgtatttctgtgggatcggtggtgatatcccctttatcattttttattgcatctatttgattcatctctctttttttctttattagtcttgctagcggtctatcaattttgttgatcctttcaaaaaaccagctcctggattcattaattttttgaagggttttttgtgtctctatttccttcagttctgctctgattttagttattgcttgccttctgctagcttttgaatgtgtttgctcttgcttttctagttcttttaattgtgatgttagggtgtcaattttggatctttcctgctttctcttgtaggcatttagtgctataaatttccctctacacactgctttgaatgcgtcccagagattctggtatgttgtgtctttgttctcgttggtttcaaagaacatctttatttctgccttcatttcgttatgtacccagtagtcattcaggagcaggttgttcagtttccatgtagttgagcggctttgagtgagattcttaatcctgagttctagtttgattgcactgtggtctgagagatagtttgttataatttgtgttcttttacatttgctgaggagagctttacttccaagtatgtggtcaattttggaataggtgtggtgtggtgctgaaaaaaatgtatattctgttgatttggggtggagagttctgtagatgtctattaggtccgcttggtgcagagctgagttcaattcctgggtatccttgttgactctgtatctcgttgatctgtctaatgttgacagtggggtgttaaagtctcccattattaatgtgtgggagtctaagtctctttgtaggtcactcaggacttgctttatgaatctgggtgctcctgtattgggtgcataaatatttaggatagttagctcctcttgttgaattgatccctttaccattatgtaatggccttctttgtctcttttgatctttgttggtttaaagtctgtttaatccgagactaggattgcaacccctgcctttttttgttttccattggcttggtagatcttcctccatccttttattttgagcctatgtgtgtctctgcacgtgagatgggtttcctgaatacagcacactgatgggtcttgactctttatccaacttgccagtctgtgtcttttaattggagaatttagttcatttatatttaaagttaatattgttatgtgtgaatttgatcctgtcattatgatgttagctggtgattttgctcattagttgatgcagtttcttcctagtctcaatggtctttacattttggcatgattttgcagtggctgatactggttgttcctttccatgtttagcgcttccttcaggagctcttttagggcaggccttgtggtgacaaaatctctcagcatttgcttgtctataaagtattttatttctccttcacttatgaagcttagtttggctggatatgaaattctgggttgaaaattcttttctttaagaatgttgaatattggcccccactctcttctggcttgtagggtttctgccgagagatccactgttagtctgatgggcttccctttgagggtaacccgacctttctctctgactgcccttaacattttttccttcatttcaactttggtgaatctgacaattatgtgtcttggagttgctcttctcgaggagtatctttgtggcgttctctgtatttcctgaatctgaacgttggcctgccttgctagattggggaagttctcctggataatatcctgcagagtgttttccaacttggttccattctccacatcactttcaggtacaccaatcagacgtaaatttggtcttttcacatagtcccatatttcttggaggctttgctcatttctttttattcttttttctctaaacttcccttctcgcttcatttcattcatttcatcttccattgctgataccctttcttccagttgatcgcatcagctcctgaggcttctgcattcttcacgtagttctcgagccttggttttcagctccatcagctcctttaagcacttctctgtattggttattctagttatacattcttctaaatttttttcaaagttttcaacttctttgcctttggtttgaatgtcctcccgtagctcagagtaatttgatcgtctgaagccttcttctctcagctcgtcaaaatcattctccatccagctttgttccgttgctggtgaggaactgcgttcctttggaggaggagaggcgctctgcgttttagagtttccagtttttctgttctgttttttccccatctttgtggttttatctacttttggtctttgatgatggtgatgtacagatgggttttcggtgtggatgtcctttctggttgttagttttccttctaacagacaggaccctcagctgcaggtctgttggaataccctcccgtgtgaggtgtcagtgtgcccctgctggggggtgcctcccagttaggctgctcaggggtcaggggtcagggacccacttgaggaggcagtgtgccggttctcagatctccagctgcgtgctgggagaaccactgctctcttcaaagctgtcagacagggccatttaagtctgcagaggttactgctgtctttttgtttgtctgtgccctgcccccagaggtggagcctacagaggcaggcaggcctccttgagttgtggtgggctccacccagttcgagcttcccggctgctttgtttacctaagcaagcctgggcaatggcgggcgcccctcccccagcctcgttgccgccttgcagtttgatctcagactgctgtgctagcaatcagcgagattccgtgggcgtaggaccctccgagccaggtgtgggatatagtctcgtggtgcgccgttttttaagccggtctgaaaagcgcaatattcgggtgggagtgacccgattttccaggtgcgtccgtcacccctttctttgactcgaaaagggaactccctgaccccttgcgcttcccaggtgaggcaatgcctcgccctgcttcggctcgcacatggtgcgcgcacacactggcctgcgcccactgtctggcactccctagtgagatgaacccggtacctcagatggaaatgcagaaatcacccgtcttctgcgtcgctcacgctgggagctgtagaccggagctgttcctattcggccatcttggctcctcccctcctcagttgtcattctttcaattcttgtaattccataccctaactttataatactccgtgatatctgtcagggtaggttcctgtgttgttcacagccaagaatggtcaggctgttcttggccctttgttcttccactttaattttagaactggccggttaaatttcagaagcagaaacctatgagattttgattgggattgaattgaatttgtagattagtttggagagaattggcattcttacaatactgagtcttcacatgaatgaacatgctatatcttctctgcatttatttacaacttctttattgcccttcagtaagggttgatgatctcttcataaagtttttgtacctatttggatctattcctaagtacctgatattttgatgctattataaagaaagttactaaaatgttttgtttctgtttgtcactggcttagagaaattcagttgatttttttaagccagaaagtattctttagactttcgtggacactaataatttaactgagtctcttttaggggttttacacaattatgtcatctatgattgactattcttttcaaattattttatttttttactaattcttatacttgtccttcttgcattactacacttagagctccagtgttggatagaatgagtgatagctgattttgttcataatcttaatgaagactagttcatgtttttagttttgctatacatttatagatatataattattttatattaatttatacttgtatacacatctttaaatattataaaatatttacagtaatgtagatatttattatttatatacttaatatttttatttgttatatatagtgagtgtatgtgtatatatatatatgtgcatatatacacatataatcaatattgaaaagttgagtcagctcttattttcttattaaggttatgaataagatgacttgttgccaccaattctgttcagtactggagatcttaacatagtaaggcaagaaagacaaatataagaattagagaagacacggggaggggaacatcacacaccagggcctgtcatggggtgggatctaggagagggatagcattaggggaaatacctaatgtagatgatgggttggtgggtgcagcaaaccaccatggcatgtgtatacctatgtaacaaacatgcacattctgcacatgtatcccagaacttaaagtatatatatatatatatatatatatatatatatatatatatatatatgtgtgtgtgtgtgtgtatatatgtgtgtgtatatatgtatatatgtgtatatatatgtatatatgtgtatatatatgtgtgtgtatatatatgtgtatattatatatgtatatatatgtgtatataatatatgtatatatatgtgtatatatatatgtgtgtgtatatatatgtgtgtatatatatataaagaattagagaagaaatgaaaaactttttttttaggttaaggaagtttcttttaatttctaatcactaaaagtttttgatataaaggaatgttaaattctactaaacatttttccatatccactgaggtggttaaatgtttttcgcttttcatctattaatatgatatattgtattgattgagtaattatagtttcgcagtgttgccaggctagagtgcaatggcgcgatctcggctcactgcaacttctgacaccctggttcaagtgattctcctgcctcagcctcccgagtagctggggttacaggcatgcgccaacacgcccagctgatttttgtattttcagtagagacaaggtttcagtgtgctggacaggatggtcttgatctcctgacttcgtgatccaaagtgctgggattacaggcgtgaggcaccatgcctggctgattttttaaaatttaaattaaactggcacttctagagtaatctcaaactggcaataaagtgtaatcttttttatgcatcgctgggttcagtttgctaatgctttcttactttttttttttttgccaatattttcttcaggatgtctgtatctgtttttaagatcatcctataatttccaattgttgaactgcaaacttcttttcaaccctaaaatccaatggtcctataattcattatcgttgtcatcatcatttacctcattgctacaaaagcactaaggaaagaaaggagatggaaggaatgactcgttttgccttgttaaatggaagtatatttaaaatgtgatactctcttaagaatgatttttttaaaacatttacttagaatttccatggtttcatactgtctgaaattaattcatgaaacctttttctatgagtctcactaacttgctatagaatgtaccaagaaactatttaaaattgaattctgagctttgaacatgttctttttcagtttcacctgataccagttccaagcgcacccaatcttttctatccactggagatgagaacgttttccctgtgatgtttaaacttaattccagagccacaatcccactgataatcattgtccttttctcctatacattaaagtggtcttcttaattgctataatattcacaaggagcctattggaactggagtactctcagatgaagaacagtattgtaggtgataaagataaagtggtattgagaactacccaatttacttcagtgaattcaatctttcttaggaagcaagtggtacctgatatatttacctgaacttttggagtgataaggaaaatgtttggcatgcattcaggaccagagaaactttaaaggtttatctcagcaaaatagtattggaaaaatgatctatttacttatacgatacaagggtatttccagttctttgattctgggggtttgcagaattgttaccaatgagaaatataaggagtgttcaagtcacagggtttttttttttttatcgtgctccttttgcctgtgtggaagagtcatgcatctgttggggtatactgaacaggcagctttgtggcctactcctgaaacttttactggaatattattatataaaacacagactgaccaaggcagataccacatgctagaagagttctgggtagtacaacattaacaatattccctttcctatggtaatgggtgcagtggtgcacagcttgatttgctacattaggcttgttaaattatgttttcagtgtggccacggccttgtgttttctactgagtgagcctgctcaggtgtcacacataaaatctgttgctgatatttattgagtgtgtgtagtggttgggggacgagataaggttagagaaataacctttcttagttctggtttttattagatttccctaaaaattccatgtttgttatattatgttccatgtatgcctgaatatatggcacagtcacataaaaagcaatcccccattttcccaatgagaatacaacccttttaaggagatagatgaaatatccaaacgtctactcaagtttaattgattaacttactaagatatacattttataatcatatgcaaactttatttgagaaatgttgatcttttccatgctcacattttacaggttcattttattcaaacttatcacatgggttgttgatatgaatgccttcctatcatgggagcaattttttttagagtttcaaactgatttcctgagtacatcgtccctacttccatccatattgcttgagacactgaacttcttaaatctgtgcaaggtactgtcactagaagttttatcctgagacatgctttgcataacattagggccttagggttttttggtttgtttctgttttgttttgtcttttggttttgcaggtagaagcctgtaactttgactttactgtattgcttttacgaggtgttttttgtttgtttgtttgtttgttttttagacagagttttgctctttttgcccaggctgaatgcaatggtgctatcttggctcactgcaacctctgcctcccaggttcaagtgattctcctgcctcagcctccctagtagctgggattacaggtgcctgcaaccacacctggctaattttcatatttttagtagagatggggtttcaccatgttggccaggctggtctcgaactcctgacctcaggtgatctgctcacctcggcctcccaaaatgctggaaatacaggcgtgagccactgcacccagcctgcaatgctctttcagtggatagccaatactttcaattgctagaacccactctagggatcctaactctttctttggttcttttattactaattattcatcatttgtgttggaataggctgaacccctgtatcttggtaaccaaatacaacagcatttatttccttttcatacagagcccttacatatcctgatggctctccagaacaatagctttactgggagactctgacccagtgtgacaggcaccgtcagctgaagctgcaccgtccagaatacctggccttcctggttggcacgtgagagtgataaacctgggtggtctcaaacaggcagttaaaaactttgaagcagcacatactgcttttgctgttcactcattgatcagaacacatcagtggaaatggcagggaggcgtaatgtgctcctcccatgtgccaggtggcagaaaactccttgtagggcaaacaccacacggttgcacaatacccagcacttgcactggtggaaagttgttccaggctgatgtgcgccttatgacaacagtagagagcagctccacgatgagagaagctttttagtgttgaggactacattggagacgatgctgtcacctaatatatctcatacatggtattgaatgaagaaaaggagaagtagaaatacactgaaatttaattgggctcctttatggattaaatttaggaagaaatcttgagaatttccccctaaacaaaaatatatttactccattccctaatataagtagctacgattaacattcatatgacacatgtgagtagtttaaaaacccaactgcctgtcaattcccttaaagcttgtcaatagtcatgtggtagatagcatttatagggtgacagtgtatgtttctagcctaccagccaagcaagtcataaataagttttggccgtctctcaaacagccctgtttcatccccttgtagactgttaactacatttaaaaagtaaagtctaaagctttaaataggtcacattctggctctgacatttcagacagaccacatcattgaatggtgccagaccctgtgctggctttccttaatatttctttaagatgaaatctgtcctattcccacccctacccagcttcctctgcgactgacatctttacctggaggaaaacatttcattttcccaagtccaaattatatgcttcatttttcacagagtcatccttgtctcctctctgctgtcctgaagcagtgccttttctgcatcctggtaggctcaaccacttcttatctctgaccacatctacctcaacagctccagagcagcctccatcctctcgcgctctgatgtcctcctgcctgctcttctgcctccaccctgcctgctccacagcctattcttaacttgcaacaagagtccctcttcaaaatagccatcagatcaggtctttcccctgcttcatatcatctagtggctccccctttcattcagaggaaaagccacatttcttacaatgggcggattatttttctgttgatgccataagaaattaccacaaactcagtgacttcgtatgaatttattgtcttacatttctggagtctcgccggggtaatgcactcctcccatgtgctgggtgggagaaaactccttgtagggcaaacaccacaaggctgcacaacacccagcacttgcactggtcgaaggttgttccaggctgatgtggagcttaacaaggacttaacaagactgagttccttgctagaagctctggcagagaatctggctttttccagtgtgtagagaccacctgcattccttggctcctggtccccttccatcttcaaagccggcaatggccgtccggtctttattgtgctgtgccatttcgacattgactgcctttcctccctcttcacttttataggggaccttgtgattacattggactgagccatttagataatccaggacagtcttcctctgctaaggtcagctgctaagcaaccttatttcttctacttgcgatcttaatttctccataataggttcacaggttccagcaattaggagatggacttttttggggggcattgggggtggttattctgcctagcagggtacaaggccttcatgatctagcctgttacttctctgacctcatgccctactactttttcttacaaagtagggcttccccctgatggtgtcaccacctcagagacccatggagctaattatctcgtgacctttaagcctttgctcaaaagtcgccttctcagtaagctctgttctgaccactttactgaattgtagcccacagtctgctttgtgtttttccatagcacgtatccacatctaacataggaaacagtttatttttatgtttgttgtctgtaacataagctcttgcagagctcagatttctgtctgtttttcctctgttgtatcaccagcaccttgaatagtgtctggcacatagtaggcaaacaataaatatttgtggaataatggacagattcttgagagaatggcaaactgttttttaataaacataatttttttgtgtgcatcagatcttccgcatgcctccaagaggggcatgatatggtttgttttggggtcttccaaggtatttagtttgggaattggtttgttgtagacactcagaatacaccaaaaagaattacaaagtggggtctggggcagggaggcatgaagactttttcattttatcagtttagactggattccagaaacaaagttaaggagagtttgaggcagtttcataatcagtgtaattcaggatccaggctaggttgacaaggcaatggaagagtgcctgtattcttattcagagttggggtatcactatactgcttcttgaaattaccccctccaggtctttagccctgaaggctctttgttcttgtctcatagaggaaactagggaagagaatatctaatcactcagtgcattgtcagtgcagatgatgagaaatatcctgtatattctagcctgtgctcctgcttccgcaagaatttttctccctctgagtaaatgatttgaagagtgaggatttagaagaccaggtattattttttttagaaaaataaggttttgttataaaaataaatgaaatctatattttatcatttcaattcaggccctaagcatacacagtagttacctttcataaaacgttcttgcaataatgctattgcactgggctttgtaatgaagctttgatttgcatcgctattctgagaactttctgacaatggtaaggtaatattaggaaggcagaggaaatgaaatgaaatgagggtaatgtatgtccattgtgaaaaatgttaagttgccaaggcaatgtcatatcaataatattttcataaattaaattaagatacatggggcaaataaatattgcatttctctttattatcacttcaaatatgtgagggcaactattaggattaaaaccagaaattagacataaagcatctcagctgaaatgagagatgtgctattcgttggttcaacctgatgtgctctcaagattcttgtcacgtttgtttcagtctttcaatctctccccctcagtatactctagcagtccctctgctgtcctcctctctcatactctgtttcttgagacagaatttctgttgagaattagtaggagagtcagtataattccattaagcatcactttcatactccacaaccaaccttctagttttaaattctgttcttttaaatcaagctggttttcctatctttttctctcctgcttcctccctgtctcatcccctcccttcctaattcaccacctcactcccttgccctgtcttcctcccctttgctccctcttctcctctctagtatacacacacacacatatacacacagagagaaagtatacacacatgtacacaaaaagtatatacacacatatatacagcaagagaaaataatataagtgtgaagtatggatttaatccaaagtttgttacactgggaaagtgaggatgaagaaagctgaaggtggttggtatgaaagaatttgagtcctcattttccattattgggaagacaaaatatgatgtcccaaattgagaaataagtattaaaagggcacaagttttctatttaaaaatagagaggtcagcaccagaagaaacaaccaaaagaattgtgaataattgtctagagactagaaattagaactgtggctactcttttctcatcaagcctttcagatagtactgaacttcttaaggtttgtatacttttattgataaaatttaaaaaatttgacaaaaaggaatggattaagagatgcaaggcaaacagaaagagtattgatatttatatggtgaaggtaatgtaggtttaaaaatacaaagtataaaaaagcagaatgttagctaataaaaggtaaaattaataacccccaccaaaaataaaaaacaacaacttaatgattttgatcttgtgtgtgtcaaaaaacatatcatgttttaaaattattgtcttttattacaataattttgggggtacaggtggtttttgattacatagataagtcctttaatggtgatttttgaaattttagcacaaccatcacttgagcagtgtacactgcactcaatgtgtagtctgttgtctctcaccctcctcctaacttccccgcactgagtccccgaagttcattatattagtcttaggcctttgcatcgtcatagcttagctcccatttagaagtgagaacatatgatatttggttttccattcctgagttacttcacttagaataatgccctccagctccatccaagttgctgcaaatgacattatttcattccttttttatggctgagtagtattccacggtgtatatataccacattgtttttatccactcattggtcaatggacactttaggttggttccgtatctttgcagttgcaaattgtgctgctgtaaacgtgtgtatatgtgcctttttcatgtaatgatttattttcctttgggtagatactaagtagtgagattgctggattaaatggtagatctacttttgtatccttaagaaatctccatgctattttccatagttgtactaatttacatttccaccagcaatgtaaaagcatccccttttcactatatccacaccaacatctattgttttttgactttttaataatggccattcttgcagaagtaaggtggaatctcatagtggttttaatttttgcatttctctgatgattagtgatgttgggcattttttcatatgtttattggctgtttgtatatctttttttgagaaatgtctattcatgtcctttgcccactttttgatgggattatttgttttcttcttgctgatttgtctgagttccttgtagattctgccttctactcctttgtcagatgcatagtttgcgaatattttctccaactccatgggttgtctgtttactctgctgattgtttattttgctgtgcagaagctttttagttttattaggtcccacttatttatttatttatttgttacattcgcttttgggatcttagttttgaattctttgtctaaaccaatgtccagaagcattttccgacgttatcttctagaatttttatggttttatgtcttagatttaagtatttgattcacctaatattgttaggctttgtgttctaacccgaatctcatcttgaattctaatccccataatccccacgtgttgagggtgggacctggtgattggatcatggaggcagtttccctcatgctgttctcatgatagtgagtgagttcttgtgaaatctgatggttttataagcatctggtatttcccctgcttgctcttctccttcctgccaccttgtgaagaaagtgcctgcttccccttcaccttccaccgtgattgtaagttttctggggcctcaccagccatgctgaactgtgattcaattaaacctctttcctttatgtattacccagtctcaagcagttctttataggagtgtgaaaatggactaatacgccatcttgagtttatttttggataggatgagagatggcgatccagattcattcttctacatgtggcttgccagttttcccagtaccatttattgaatagggtgtcttttccccaatttatgtttttgtatgctttactggctgtgagtttttggctttatttctggattctctattctgttccactggtctatgtgcctgtttttataccactaccgtgctgttttggtgagtatagccttgtagtgtaattggaagtcagataatgacttcagatttggatgcctccagatttgttcttttgacttagtattgcttcagctatgtgagctcttttttggttctatgtaacttttagggttgtttttctagttctgtgaagaatgatgctggcattttgatgggaattgcattgaatctgtagattgctttgggcagtatgatctcatttttaccatattgattctctcatccatgaacatgggatgttattccatttgtttcaacgaaatctatgattttttttagaagtgtttaattgttttccttgtagatatcttttacctccttggttaaatacactcctgggtattttatatttttggagctgttgcaaaaaagattgagttcctggtttgattctcagcttggttgttgttggtgtatagcagtatagcactttattttttttgatacatgagaagagcttcaataacaaaaacaaaaactaaaagaagagtggaagaaagagtggtgcctctttaaaccattgctgatcctagattttttttaagggatgagatttggttccacatttggtgcatatcatagtgtgtcaggaaaaaattttcttatccaacttggggcatgtttttctggaagttgagctttaaataatgcatagtcgtgataaaggattgccacactgttttacaggcacaaataatctttttttttttttttaattgaaaggagtagacttttcacttaaaaaccaactcttctaataggaaagttttaggcttcctttaacataactattttattgaagtgatgaatttcccttctgtactttcaaaacaaatttgtttgttttcctttaaatggaaaaaaatgtgcctttcactgccctcaacaacgttgacctttgacattaatataatacttaagaaatgtattttagcccagttcttcctttctgccttccacttgattgctctactattagatttataatgctgaacaataaatgcaattcagctttatgtatctctagactaaataaactgagagataaaaccgagatagaaaacctaagaatctttaagtatagaacagggcaaaaagtctttctctagtaaatcaattaaagacttgacaggatagatgttaggagaagttagaatatttgtttatgataatattctacatacattatttcatgtgatggatataacagtcctcattttagagatgacaatctgtgtgtcaaagaggctaagtgatttccaagatattgcagcttcagagtagcctacacagataagttacagtcaaaaatcaagtacatgagaagagtctcagaaatgaaaattaccatccaggctacactgtgactaatcataataaaataggaattaagagggaaaaataaactttacaaatattaagtgaaataaaagatagtgcccggcatgtagtaagggtacaaatatttgctaaatgtatttatatgaagcaaattaaacaaatttatgcaataccttatttttgtattatatgattaattctgctttgtaactttttaaggaaattgagacatttgggatatttatagtaactaaaataacataaaattggtatcatctaaatatttaacattctgagctgactagagttcgaaatgttttgtgaaaaattccaagatattttctagaaaaaattaattgatattgagtcttagagtatattgagtagagaaaaacataccaagaaagtatgttaatcacatttctgtttaaaaatagaattttatagtgtacacaccagccgggcatggtggctcatgcctgtaatcccagcactttgggaggcagaggcgggtggatcacaaggtcaggagatcgagaccatcctggctaacacagtgaaaccctgtctctactaaaaatacaaaaaattagccgggcatggtggcgggcgcctgtagtcccagcttctcgggaggctgaggcaggagaatggcgtgaacccgggaggcggagctttcagtgagccgagattgcgccactgcactccagcctgggccacagagcgagactccgtctcaaaaaaaaaaaaaaaaatagtgtacacaccaacatattaataagttgtgcttatgtttttagttatgggtcataggttattgtaacatcttttttgttccttttggttaccagtactttgacttttcctatgacaagtacatattatctaaaaattacctgttaagttttttaaaaagtgatggaaagatgtggaatttgaatgttgatccttaagttcagattaaatatgtttcagtatttagccaggcattgtgctaaactctttacaatggtatctcacctgttcttcacttcaacccatgaggtagatattatttgttttcattttatagagaaacagaaaactaaggtgctctctctcatatttgaaagcttgactttagtgaaccaatatagtaatatttttccaagcaggcaattttaaacaacaatactgttaacaagctgaaaagaaatactgagagagagaaggagtggagagagtcgggggagatcagttccttcattatactttttttttgaagttaagtaattgatacatattaatacaaatgtttaatttaaaatttcccacagaaataccaacatgtccacaatatagtcaagcatgtcagttcaccagctgctgcttttccctgtagtcatccctccttgcagcctctgtgcatgaactcctctttcaatctgtgttatttgccctcaagatctatgcacagctgcaatactgaaaattccttttacctttctcttgggctgcgttctctttattgagatttcatagtttctcatttctggtttagtccctcattttcatgaagctgacttctcagtagctttctaagaaagattacatgagagcaaacactttctgagaccttttatttctaagaaatttttcactctaccatcacacttgatttatagtttggctgcatatataattctaggctagaaatctatttgcttctgaatcttgaatcgattgcattgctattttgtagcccccagtatggcttttgagaagtatgcttctattctctttttacattccagacatggatttttttttctctgtggaaacttttagcatcctctatttatccctaaagttctgaaaattcagagtggtgtgctttatcaagtctatatattttcagtgtggttatatatgatattttacctttgtcttcaatatttaatatcagcacttaaatcctcttcacattgtctgttacttccagattttttctactgattattttggccttttattttaaagggtttcctcatttatctgttatcctcagctgtatgtttatatttaagaaggatccccttaaaaagctgattgcggctctctggtgtatggggtttagtggtggaaggtatcccctaagctggtagcaccattaggctaattggatagagatcctgcctattcactcttggctggtagatgttgttatccactggccgtgtattgattatctgcagattatatataacttagcagcttaaaatgacaaacatttattacctcatacagatgattactgtcaggaatgcaggcatggcttagcttggtgattctggctcggggtttcccaagagtctgtagccaagctgtcatctcaaggatgggtcagagggctcactcctcagctcacatgtgtgggtgctggcagtcctaatttcctcaggttgtcagtatgtccctagggctgcttgggacatggcagctgcatcccctcagaacaagtgactcgagagagaaattaagaggggcatgctctaaagacagaagtgcagttttataacctaatctcagaatggacataccagtacttctttctgtcatattttattcatcgcacagaccaaccttggtgcactgtaggaaggaactacatagtgtaaatccaggcagtggggcttgctaggtggccgtcttggagacaggctgccatggacttcttttctcaattattttccgcagagaaagactcctctccatgtgccttacctgaagatttaagcctgggtgacagtgtttagggaacctagcttggaaataaagaaggggtctcaccattcagtatttgactcttccttagttttctgggttttttttttttacaaccatgcatcacactcagcctctgcagttatgcctggcatcatttagatcagaattggtcagcctacccagaaaatgcaactctgatttgtacaaggaggagagaagagaatgggcagtctctggagcacagactgaggaatggaaatgggccaaggcctcgttgggcattttacaggctttctacccatcctcttgccatcagccccaccctgaccttttaaagcagctgctttccccaattcctgagctttcctgggtccctgcaacttggttggcctccctacctctgtaggatgtcaggtctcagctgtctctcttctggagagagaattaccactgatcctggtccttatgttttcacttcccatcttccaacattttgttaacatcactcatctccactcattttctcctggttttcttcgtatttgtgagttttacctattttactatttcactgtctttgtggtagttttaggatggttgaatttctgtatttagcctgccattaagtatatatttccatttttctgcttgtataatttccaatacatatcctgatagatagtatttcctacaaaatttacttttagaggaaaaattcaaaatgttagcagactaatcagcttatcctgcccaaagcttttgagatgagaatagaatggattatgctttccatgactcttttgatttctggctgctttagaatgtagatttataagaaaagaagagtaggtgaaaatggtcagtagtatactgtctagggaatgagcttagaattctgaggattttagatttctcttggactgttgcttaaaagtaccactcacagcaaacacttgatagcttaacgcatacaaccgcattaaagagatagtgttttaactgcacatataacttaactatttctgtatttatcttcagttttcagtgtttaaacctgcctgtttcttacattgttggaatcatggaaagaaagctataaacaagttggaagtatttattacaatacctcaaggtgaaaccactaaagtccttctgtgggtaatttattatactgcgagatctcagacacatgagaaactgtcctgaactcccaaatgaaagcacttccaaaatacagcatttctaaaacgagtaacctttaacttatctagcataagcagaagaataagatatgtttaaagttttcatgtttttgctgatagacttaaaatctacgtagcgtttcctagattctgactttgacttgctcacacgctgtccctacccatgcaagctagaatctttcctctcccttcttgatttcaacatgagtttagaaccaaaggaacttttacttggtccggtgacagtttcccgtctgagacttccccacgcaggcacagagccatggcccctgggctgtttttatttgctctaattcaaatgccaattctaatttgctttctacggtgctcttttgttcgtctgtcttcttctagtatttataattgataactgtagtttaattattcaaaatcattatttttagatgtttaaaattgttttttttccccttcagacttgtatataaatgtcattatctcctgagaagtggtataattttcagaagcagagaatacattatcttctcttgtatccagtggtgtagtgtctgtcggggttcccaacctctacactattgatgctttaggctggctgcacctttgttgtggaggggctttcctgtacgttgggcgttgtagggtgctcagcagtgtccttggcctctgtcattggatactaataacatgcccacttcacaaatttaatctttctgtaagactcagaaatacataggaacagaaacaaaagcaaaaaatcagtatcgactgcttcttgagggctcactgcctgctgtgaagcagcatctgcaggtctgtggtcagcgctggaggttgaaaaccattttaaatgagcaactgtggcgggttcacagggtcaaagggcagagttcctgttgggatgtgggaaaagatgtgatctctactatctcagtggcaattccacagccaatggaagtaagcaatggaacaatttagaccatttgagaaccaaggtgtcaccctactgtgaaatctgcagacagagaaggcatttcatctgtatttttaccttcaatccttgtctgtgtctataagttcacattgccgacagcccacctgccagctctgctaccagaattgccttgctaaccagctttactcctggaatttaggaaagtctgagaaaagtcttcatctattcatattggcatgctggtacttaaattcaatgaaagtaagagtagaaccatgtattcaataaaaataagaatagctttatttgcatgctgtcactagtatcaacctaacttcttatgtccttttcaagtaagtcagtgaaaaccagaaatttcctgacagctggccttggaccgtggctgctttaacctctctgcaggggcaagtacatttctgtcattctgcatttgtgatcctgaggtctgactgtcacatgtacagttattggcatccacagggtagaacttctttcttatctatagttcccaggtacagagcaggaaaggagaactgcagccaaggggtgatatctaattcacaactgggatgccccagtgtgtgtgccgaggagaaggtacctgagtaatgttattcattaacatttatttctgggctttggccaattggtcttcctgtagggttatttggcatgttctaataaaatgtgcctatgattgagattatcttggattaagaaaataacttattcaacaagtatttattgagcatctcttctgtgttgagcactgtgctagagagtatagcacagaacaggccagatacagctctggtgcagcttgtagtctagtctaggagaggtagaattgaacacacatgtaactgcaaactttgagaagtgccacaaaggcaagagtattcaggaaacccagtttaattagagtcagagaaggtttctgtaaagaagtgaaatttaagctgaggacatttaaggcagaaggaatgtaactgtcataggcctgtactgtaggctgcaaagatcaacttctccatgtctcatgaatagttaattatgtatatttcttattttagcacctcacattatgcagttgactgtcgaacaatgtgagagttagggttacagggcccacatacagttgaaaatctgagtataacttgcaactccccaaaaaacttaactactaatacctattgttgaccagaagccttaccaataacataaacagttgattaacacctattttgtatgttatatgtattatgtatacaatatgtatttttatgtattcttacaataaagtaagctagaggaaagaaaaaattatcaaggaaatcataaggaagacaaaatatatttactattcattaaatggaagtagatcaatataaaggtcttcatcctcatcatctgcctgttgagtagatggaggaagagaaggggttggtcttgctctctcaggggtggcagaggtgaaagaaaatccatgtataagtgaacctgcgcagctcgaacctgtgttgttcaagggtcaaccatactgacatgtttacatgtatttctccttggcaagatgcagaccgagttcctagaagatagggatgatgtgttattcatataggtataacccagtcttgagcttcacaacaaacaggtattggatgatagttggggaattgagtgagtgaactaatgaaatgaatgaatcaatgaatgagtaaattggaggatgtaataaaggtggttgacatctgctttgtcctccgtatccatactttcttactctagatactgagaatctcttctgtcagtcatcttgtgcagtggggtttctttcttacttagttttgaacaattggccctatttgactttgcatgcccaggcctcagcaccttgcctggcacacagctgttcaatgagttatgagtgaatgaatgaaagaatgggtttattttcctgatcgtgagccttattatgtaagcttgcttgctgatgtctgaaacctgcagccttgcctgcctacctagaccgtttctgcactccacctgaggccaccactcccaacagttacactgaagttgatttgcctggaaatgcaaaatgggaaaaattggttttgtctctccaaaataaatctcaaaactgtctctttgtctgcctaggccaaaccactatcatctctgtctagcactatgacaataatctcttctttcgtctctctgcaatctgttttccacaaagcagcttaaatttatattttaaaatataaaaggcaaatataaaatataaatgtaggatttaaagtattctctaagtcagattgtgggacttacctgctgggaactgtaatggcctcctctagcacatagaatgaaatgtaaacccttctgcacctgcaaaacctatcttttttgaccccgcctacctctgttggctcattttgtgctctttttccctttgttcttcgtgctccagccaccctggccttcttcacgtaccttcacgtgtctttcacttacccaactctcattcccttcatgaggaacctgcccagaggagacactcaggaactctttggacacattcatggctttttagtccactgatttttagatatgactttacccataggatcatttctttccaaggaaacgttaagcagaacctcaacacataaagcaaatgaaagtaggggtactctgattcccatggaaacgaggatcccaggaacctccggtcctaaggcttcttctgaaaatataggtttccagagatgatggtttgcaaggcattgctcaggtccagtagtgcctgtctgacttctgtgtttactttgactggcctctttgaacttggaccactgttcttttaggcatttagaaattccttcctactcaactgaactcctgattctcaattcttagcctactgtcttgaatggccacacattctgctcttaaaatgttaaaacagtctagatgggaagatggatggataaaaaagttaaataaaacttgtatatggttaacttccagatagttcctctaagcaccaaaagagtccagagaagcaagagtttaagggtgggggctacagagatactggaataatccatggaagtgtctagatttgagaaaggtctttgaaaatagtaggaaatagtgagaaatgatgcagatagtctactatgcattatggtttgacgaaaaacataaagggaatgagacagtttgggtaatagaggggcagccatatcaacaaagcatgtgaaggagtgtctggcctgtagatatgtaatgtaaggtcacaaatgcttaggggagttggaccagtgccataacacagaacattataccctaactaacaaatgtgaacatagtagttactgttgccataaatatcatgtcctcagaaaaatatataattcagtgagcaaaaatttattttaattacattccagctcttgcttctgaagatccacctggttattttgctgagcctcagttgcccccccattccttttctggtcgaggacatgatggcagatggcaaaactcatctattatagttatttctttactgtttacagagtaaccattccctgacctcaaattctgaggtcatcgtatcaaagcctcctatgcactcattgttttctacttctgagaacatctgcccagcctggatggctctcttttgtataacatcccagcattgtctggctttgctcactggtcacagccagggttctcatgctcatctagtccttccctcaccttcacccatgtcaatgacttgcttaattacttaatttctgcttaattttttgatagcctgaatgaaatggtcctatcctcttcctgaatcatcctatgtaggtgctctccaaatcctggccttgtcactgggtgactggcagaaagataggaccattgacagaacagtgaggtcaagggggagctgacaagagggaaaagataagttaatttacaacacaattagtataagcagaggtgatgtttaggtggttacagataaggaactagaactctagtttgaaaatctgtgtttttaaataacactggaagataaagttcattcctcaggtattcattccttaaatgtaaacatatgctgttgccaggcactgtgctaaacactgtgagtataaaagtgagttctcactttaatgcctttaaggcattcactctctggtgtgagacacaggtgtgatatagctgtataatatgtctacatatttacctttagcgtaatctttccatgtaatactcagatcattaaatctggaaagaaggaaggaagtctaaaagtgagtactcactttaatgcctttaaggcattcacaccctggtgtaataaacagatatgatatatctgtataattttattgtatctacttatttacctttagcataattgttttcatgtaatatccagaacatgaaatgtgatcatgaaatctgggaagaaggaaagaagttaggagaccaacattctaccacttagtagccctatgactatagcaacccttctgaacctcagttttctgatctgcaaataagagcattggacttgatgaagtgttttcagttgatctcttgtgaaatcagatgcttttccaaggattccagaaacatttgatttcaaatgcttttttaaagtgtgatgaaaataactcatgcacttaaatgcattatgtaccaaaatttgcctcatcaggagagcctcgtttttcttgacccaaggttacaattacaccttataagtttggacaaaaggttacaaatttgatttagcagtataagcaaaaaaaaaaaaaaaaaaaaaaaaaaaagcacgctgattaataaaatatgctttttgtttctttcacctatagttgtttcatgaaatatttgcttggcccaatgagttttgctgttaaagacattgccatcaccagccctcatctgcaacatctacttctagctctaagcagctaagattttttaactcatgtaataaagttgatttatacttaaatttatcagattgggtggttctttttgacttaacagcttattgatgtataattcataacatattgttcacctacttaaggtatacaattaattggtttttagcatatgtacatagttttgcagccatcatcatcaattttagaacatttgaacgatgccagaaagaaaccctgtacttcttagcaatactccccaatttccctactgtccagcccaaccttaggccaccactaatctactttctgtcttgatagatttgcctaatatgaacatttcatgtaaatgaaatcatgtaatactgtatgtggtgtgttgtgactgccttttcccgcctagcatgttttcaaggttcatccatgctgtagcaagtatcagtactttattttctttttactgccaaataatatttcattttatggatatgccaaattttatttgttcatttataagttgatggacacttgttgtgagcactctttagctattatgaatagtgatgctgtgaacattttgtaccagtttttgcatgtacacatgttttgatttcttccaaatatatacctaggagtggaatggctggggccacatgatacctctgtggttaattatttgaggaaccaccaggctgttacccaaacctgtggcaccactttacattcccaccagcagtgtatggtcccagtttctccacatcctcaccaacacttgttatgatgtcttttttcttatagccatcctagtgggtgtaaagtggtattcactgtagttttgattttcatttctctgaaggtagaatggatggtttttgaaagaaaagtttcagcacaacaaaggcggaaactttgtttcaaagttacagaaaggagaaaaagatattagggatggaaacatataagtcaaagttggttagagaactgtctgagagaatagggcatggcagaggaaatctccagagagctcatttgtccagattatagccatgacacaagcttaatggcaataaagttatagtccccagaagaaaggcaggggtgtgtttgtgtgtagctacctctcacacacccagtttttccagcacaaagctgttgccgctttctaatctgagtggattggggatattcactcttactccccacctatatcccaaccctacagtccacggtcttttctgtcaccatgtcactgattttatagttcccttcacttaggatgacttctttattcatccaaatctcatccttaagacttggggacatcaggcctacctgcttggagcaacctctctgacctcttggacgatgttaacatcctttttatcccttgtgtggcatttaaagaggtttgcatcacacagcttggtacttagtgatacaattatcttgtatcattcacattattttatatgtggtttcaagtatcccagtgggttcattgaggggaaggaataggtttatacaatttgatattgcacataaaactagaagcatactaggtgcttagtgcatctttgttgagttaaataagagggttattcttctgttccatctaaactctgcttggaatttcataaacacaggcaggttctcactggctttgggaaaaaatacccctcttataaattcattaatacaaagcaaggggaagagttgatattttaagtttacattcaggtaagattacattgaaaattataacattttgttcaatctgtgcttgttacctacaggaccttgttatatgtaggaaaattatctttgaaacctctgtgtgttgtcgaagtcagatggctaatattgacccaagctggcatctccctcacttcacattggggatcctgttgagttgtcctcaaggctagccttttggaccactatactgcacttctgtccttaagctctcaatgtgaaatcagagacaggcaaagtcaagcaaacaaggcaaaggttaatacgagcaggctaatagtcaacagatgggagtcttcagcctgagtgagatcccgctagaggccttcccttcagagacccaagaacagttgaactggaaatttgaccaggaagggactccctaagagaccttgcctctgagcatgtcagctgaaaagatggcagagttcagagaaaggtgatgggagatggtgggcagagaaagcaccagttcctatgtactacctccaaaccagaaatttctaatacagcaaataaagcaaattggaatgatttcatgaacctgtgtagaggtctgcaactggaaaggatgtcctgaaaagcactattttatatagtttggtagaaatacatccacactgtatgagtctcaattttaaaactcccttgaggattaggaaacagattataagtagctagaatgtaaaataataataatttagacattgttttggaatgataaagtttattgtacatggtaaggaaattatgtattgtagattttcctgattctgggcatgcattgggaccacaggttatggtggctcacattttaggattgacttcccaacggctgctcacacagcctctggaagtggtaactttggaaggactggttgcaaagtggaaccagagtatattgcagtttcacaagcaggaggtaatagcatttattgagcaactatatgctctcttctctctctcttctcttctctctctctctctctctctctctccctctctctttctctctctctctctctctctatatatatatatatagttaatcttttcaatgaccctgtgtctttctttggatagaaatttaaaataaacttccattttaaatatgaggaaaccaagacttaaggaggttaaggaattgggtctagtaatatatcaagtcaatggcagaaacacagggaactcaggtcccttggattctgtagcactggttttattcctacactttaccccctccattgtaagggtactaaaatcttcatatgtggtcaaacaccttttacttttattaggagaaaatggaaaagaaaatccaaatactccaaaaaatccaatgcaaaaactccaaaatatcaaaagctacctttttcaaacaaattcagttttttattactcttactttcataatttgctctttttagtaattatttgcttacttcattgcttagatttaacaatacaaatagatgataaaaatctaatgattcagttagttatattttaaatgttatattattgtgtcacaaaaagtagacatgtaatgcatgtcttatctaacattacctaaaacatactggcttccctatgtaattctattatgaatactatgccagtatcttctctaatcattccaatttaaacatagtatctatgactggattgtaacagaaattggaatttgccggccaacactgaattggaaatgcttccattcaaattttcttacaaatgatctttagaaatgtattttaaatttcattctagcgaaaccaacttagagtgaatcttaatgggctagaacaaaatagattttggattgatttttctcataaaatatgcaaagccctgtttttaaatagagtttttccccttcaatattgttctttttctctgtttagcaaataatttgtctaaaacgtttctttttcagattttagttagattacaatagaattaacatcttagaattgccaaggtagatggaagatgaagagaaaatccggattccagaccatgctaacttcaagccagtgttttgcctgcagctgatctcaagaattaggtgaaagtttcactatgtaacctgttttggggctcaactcttcataatacgatcattcattaagtaatataaccatggataattgtaaaaaactgggacactgggttttccccccttactccacaggtcgactaggctgacagtatacaccagaaaacaggcatgcaaggcatccttctacatctttctcttttgcttgcctcttgttagttacaaagatacatactgtgccaggcactaagctggtttcaacagctatttatttagattgtgtgaactggagctgaacttgaacccaattaatagcaactgaacttgaacaaactgatatgaaatcattacaggctcagttccctggtccattatccctgaagagatcatccgacagcactccaggtgccttttctatgccaaatcttggtgcagtgcccaatcagagagtgtcggggggattagaagttcggttgcatcggagttagctcattaccacatttgtgatcgctttcacagagaggagaggtggtgatcccactgggcaggattgcagagaaggctttgttttcaacaccatctggcacatggttggcactcattaacacagcacaatgtcgattaaaataataattgtacgtggcagcaatgctgcttagacaggtccccacctttggccttccagcaaaggaaattgaagaaagagaaggctgaggagttgcctctggtaactctggtctctgggtttgcatctttcttcatgcccacacctttttttttttttttttttttggtaaagaagctacttttttaaatgtatgtatttatttttatttttagcagcagtacccccccaccccccgccaaatccccctgtttttttaaactgggaataccatgagtctgaccttgttcgcagttcccaaggaccctaattacagagctccggctgtagctggactcccaattcaatactgcagccaggaaatatttgctgaaaggggattctatgcagtcatatttcttctgcaacttgaattatatataattaagagttttaggcttttctcttttaaaggatgcatggatgaactcaatcattcaggtgctgagttaagactacactgcctttccttaaaaaaacagatgtgtatttacttcggcagctccagatcttgactctggtagcatctacttgatttgctgtttgggggataggagtgcagatttttgaaagaaattgtttgagtttgaatcctgtttctaccatatactaggtgtgtggtgaggagaaaatcccttaactcttggtctcccttttcttcactgctgctatggtggtaatagtcatccctaagctttaggatttctgtgaatataaacaaacatgtaatacactaagaataatgcccagtgcagggtgagctcttgatatgcattagctatgatcatgtatgcctcaccatcattttctttctttcttttttttttttttttttttttgagatggagcctcacttctgtcgcccaggctggagtgcagtggcgcgttcttggctctctgcaacctctgcctcctgggtacaagtgattctcctgcctcagcctcccaagtagttgggattacaggtgcacccccaccacacccggctaatttttgtatttttagtagagatggggttttgccatgttgggcaagctggtctcgaactccacacctcaggtgatccacatgccccagcctcccaaagtgctgggattacaggcctcactgttattttctgcaagagtttattcttcctccagattgtgcctcatacctatttaaattttttattcccaaatgataggatttactagttgtagtgatgtaggtagtggttatgtggacatttgtccagatatgttgatcaactttttttggtaggacactattatttaattccttgtcatgctagaccaaggttagaagaagccaattgatgtgggtaatttcctcatagatctataataccttcataccataataattaatgaagcacatcatttgtttccagagcagattatgcatatcttaaacaaaagaaataagttgtatatttcaagcctataggtaagcactataactaatgatcatgtggttttctctggttgtggaaccataaacagcatgccctctggcactgtaatgatttgtgttctataatactcagtgtaaccatggtttttattctgtttgccgtttggtatgtggaaaagccttcaagaaactggctttttgcaggagtgtttacatatcattcatgccaccaagagaagatgaccgacattttagatgcagaagaaagattaaatgcattcagtttaactagcggcactaaaaagggctgcatctttgtattgttgctgtttatcttctttccagcagtggaatattgagcttccccaggctgtgattcaggtattaatgccgattttaggtcgggcaagagtgtgttcagtctgcggcacttagatagcaaaggcaaactgctcacggctattagtcaggagtttctgtatgccagtgattgcatgcttgtgactcataatcagggtgattcacagcaaccgttagatgggcttgctgtggctgtgtttttcgtttggactgctgtcattgccaaaagtgtcagcctttctcctacagatctgaccgtgtgacacatgcacagtgccctttggttgtgctgaatggctcaccactaacatcatggctaagttttattatcttggaggaattgtctctcacagtgagtcccaattagacaaatgaattttgtgttgttttctttctgaagtgttactctgggattgttgacagaatttgtgccacagtgttctcttgggcagtctgaattccagattctctatcttggtttaactatgctctcacttgagaatcagcaaggagatgtcatgttatctgtttttctgtatacgtggagctgtatcggtggtctgggttcctgctgagcagatacataaataaccacacgtctctctgggtttaataccagcccggttctgacatccaaggctgactcctattccatgttttgccccaaccaccgaacacgatgctctgacccctcaacacacagatgccttgtacctgacctaataagttgagtcagcaacctgtatttctgatttgtccattaattctgtgtgtcctggttgagacccacttgcatttctgcatgcttgcttaacctacgcctgtcacaactacctctgttcctttttgaacttaacaaacatttatacagcccgcggtacgctagggtctgagcatacaactgggaaaagatagataggatctctgttctcatgaaacttcccttctggctcttagaagttatacatgtaaacaaatgcacaagagtctctctgatggtaacaatgcaatgaagaaaatgaaacaggataaaggaatagagagcaagtaactatgacagggctattctgagagtagagggaaaggtgggagaacattctacgcagagggaccagctagtacaaaggcactagggcagtctgggtgaatttggaaagatagagagccaaggaggccagggtggctgcagtgtagtgggtgggcagagaagagccagatgagacagagtcaagcctgatatagacagtcttttttctattttattttaaaatatttaatttacaaataaaaattgtataaattatacatgtacagggtgatgatttgatctgtgcatgcattgtgtacttattaccacaatcaaatcaacacattcatcatcatccttagttaccatttgtgcatgtgtctatatggtgagggcacttaaaaatcttctgtcatcaaatttcaggtaaacaacacagtattattaactatatttaatgctgtacatgagatccccagaatttatccatcttgtaactgaaggtttataccctttgaccaacttctcaacacttcctccaacccttcatccatggcacccatgattctactgtctgcttctatgatttaaactgttttagattctgcatatgattgagatgagatactctttgtcttttggtgtctggcttatttcgcttagcataatgtcctccaagtttatccatgatgttgcaaattgcaaaatgttcttcttcttatggctgaacgatattctcttgtttagacacaccacattttctttattaattcatcagtggacaccgaggttgttattgtaggtgttatttacacctatcttagttattgaagtaacgctgtaatgaacatgagggtgtagatacctctttgagatattgatttaaattcctttggatatatgaccaaaggtgcaattcctttggatatatggctggaccatagggtacttattaatttacacatttttaattttttaaggaacctccatactgttctctataatgactgcaccaatttccattcccatcgtgcacaaggcttcccttttctccacagcctttccaatagccagctgctatctcatctttctgataatagccatcctaacaggtatgaggtgatatctcattgtggttttgatttgcatttctctgatgattagtgatgttgtgcacctttttatatatctgttggccatttgtatgtattctttgaaaaaaatgtctattcatgtcctttgcccattattaaatctggttatttgttttttgatattgagctgcttgaatttataatatttttggagactaatccctcatcaaatatacagtttgcaaataatttttcccaattcataggttgccttttcattttgtggatttttttttcctttgctgtgcagaagctttttagtttggtgtagtcctgcttgtttgcctttgcttttgttgcctgtgcttttagtgtcatatccaaatatcattgccaagatcaatgtaaaggagctttttcactgtgctttttcctaggaattttacattttcagatgttacatttaagtcgttagtcttttttgagttaatttttgtatatgaggtaagataagggcctaatttcattatattgcatgtgtatatttggttcacacagcatcatttattgaagagactatcctttccccattttgcattcttggcactcttgtcaaagattagttgaccatatatgcacaggtttatttttgtgctctctgttctgttccattggtcaatgtgtcttgtttttatgccaataccatactgttttattactgtggctatgtacttttgtaatacagtttaaaatcagggtatgatgcctccagctttgttctttttgctcaagattacttttggtatttgggggctttttgtggttccatatgaattttagggtttttttctgtttctgtgaaaaatagaattggaatttatataggaattaaactgaatctgtggatcactttgggtagtatggacattttaacaatattaattttttaatccatgaacgtgagatctctctccattaatttgagtcttcaatttctttcaacaacatcttatagtttttgatgtacagatcttttacctcctcacattaacagaatgaaagataaaaatcatatggttctctcaacatgtgcagaaaaattcaatattctttcataattaaaaactcttaatagattatttgaccaaattcaacattctttcatgataacaactcataacaaattaggtatagaatgaatttatcgcaacataacaaaggttctgacaagcccacacctaatataatactcaacatgaaaagctgaaagtttttaaggttaacaggagcagactcatagtcgacagatgggagtcttcagcctgagtgaggtcccactagcggccttcccttcagagacctctaagatcaggaaccagacaatgatgtccatctctcaccacttctattcaacatagtcccataagtcctagccagagcaattaggcaagaaaaacaaaagacatccgaattaggaagaaattaaattgtctctgtttgcagatgtcatgatcttttacatagaaaaccctaaggaaaacccaaagaaactgttaaaactaataaattcagtaatcaattcagtaaagttcgggatataaaaatcaacgtacaaaagtcagttgtgtttttatacactaacatttaactatctgaaaaggaagtttagaaaacaattccatttacaatagcatcaaaaagagttaaacatttgggaatagattgtaatctggtagatcttggttagagtttattggattttaatagaaatggcaagaaacaagaatatgaagcaggaaagtgctaaaatctgatttattttgtgtctctgtttcagcctactttatttaagtatgatctctagtgccaggttgctagccctatctcagtttctgactcatatttttgacatcagctttaaaaatgttcacaaatatatatgcacttggttttcattattttgctgtgtcaaatacagaacagatttgttttgggtattagagcctttctccactattcaccaccatcaccctctactcacatcattgtctttctacagaaggccgcctttgactccgagagacataacctcttctgcctctgtggtgtctttgtgcctagtacttaccacttcctttgctctacctcatcctataagtgtctttcccctatgggcttggagttctttggagggagtccattttctcattcatctaagttttccctagcttccagcttagtgctttgaacatagtaggggaaagatggatatatagatgaatggattacgaatacccactaaaatgttcagtctgctatgaagccctcttcaacagttagaattataattctccctcttgctcctacagcgctttccagtgactgcttggaatctttagtggcattgtgttatgcattagtatgtatctttagagccctttgggggtcaaggactatgtcatagtcatctttgtttccccaggatttaacacagtttctagcatttagcaatcttcagtaagtgcctggacaaaagatgttaaacaggacataaaactccaaaaacagaagggctgtggaagtgtattaccagacagaaccctgggctagatgtgttttcttaaggcacttgtaattcctcagaaacttcccaaaccaatagggagttgcaaacctgctatggagcatcctccaggaaagcagctttggagctatttttcccgccaaactcttttgaccataacacaaagccagaaattgattttgcattgcaagccagtatataactgttctgcaaaacaaaaatgcatctttactctgtaatacagtccaatatcttctatgccctctgtggtatagaatgctgatcatgaccctttaaactgattttaagactcgtgaataggttgcagcccacagattgagaaaaccctgtttttgaggacagagatagtcccctgaggtgagcttcagaggaagaagcatgagctttacctggaacccataatatctcactgtactctgactgtttgttgaatatttgtataaatttagcaatgaccaagcgacaaccaattaaaacaaggcatcctggccaaaaagaatcaagttgtgtagtggagacatctttgtcatttagaattgagttgtttgaatgctgaaaagttgttagagataggtccaccagtcacttagttcaccatatccaaatacagcattgtgaatatttgaggtaaatgtgttgcttctaaaatgaaactgtgggcccactgagatatagggaacttaacgtttcttctgccaatatgttgacataaatattgatgttgttaagcatgtatgaataggagaactatttcagtctttttatctctttaaaactaatttaaatctgagcattaaaagactgtttgataccatatgtttgttttagataggaaacaaaatctattctaaacataagggcttatgaaatctgtattctgaacataagagcttataaaattagtatataggactggaagctatggtaaattgtttcatggccacagattcctcccgtgttagtatgcatggccctttgtaatgtgaccttgctgttcctcctgtccagaggggggtctgtttacccaacccttgctaagatatgttgcttttatgctgtgctaagaatccaacatttgctcagtaatgtctttttattgtggaatgtaagtccagcatgaaattgttgatttttctctttgaagaccatttaaaagctacttttgaaagtgaccaaggtctgtggacatgagcatcacaagccttttgtgaaaatattagatagacttcaagaacacaaccaaagactgccacagactagaaagatacacatcacaaatccatttagctgtgtacgtgaaaggaacaaattaaaaggttcagcaatgtcactggcatatctgagaattcaacctatttcattttgagacccacataccttatctgtgaaggcaactctgtgtgtgcgttttccaatctagatggatagcatagaatgagatgacctagacaagcacagcacaaagacagttgtgatagcatccgaactttcatgtgtagcttataagggcaattcctccttttctatgtaggccttttttgaaaatagcactgtgcattggtttgcttaccctgagaagacctgaaagatgagattatgatctttcatctcaaattaaagaaggcttgtctcaggaaccatttgacaagttcaaacgctgctgacttagatactggcctcttatcagcaccttcaatttaatgtttggagtgagtggtaggcctatgttgttgaatttttatcatatttcccctcatcttggtagattatgctttaattcactattctgtgacttatcaatattgtctgttttatgctattgagctataataaataaatagcgtaatgcagtacttacaggtagtgaaattgaggcaaaatgggcttgtgacataggctagatcaaaaaggtattacctgcaagttaataagtagctcagattctgctataatttgctttattcataggtcttgtgggggaaaaaataaaataagctttctcgttctgataatcccttaaaagagtcatgaagttttgatctttggcttatttgatttatttttaattgatagaaaccaagccattcctgtgcctctcaaaaatctatctgtggaaaatattttaacttttaaccaaattatgtcttcccagtattagtgaccctctatgttaaaatgtttttcccttgaaagttagaactccaatgttgttagaagagtttgattctctttttgaagaatcatagaaacacagtacagttttgtacctgtggcctttggattttgattcacattgaatttgatgccaggagttacatggaaaagtcaataataatccgtggatcattgccttactctgacactgggtgaattagcctgctggggtaatgttctccagcttgtgtaatgggcctatctagtagcaagacagcagccatatgaaacacctgggtggtcttccagagtactttcacatggattagatttcagttatccaacgtgaggtcacaaaggcttagacagctgggctggtgccacatcatgaacagagtgcgacttcttcctaccggatgcataatgtaaaaggtgcctgaggttaaagctgatccttgggctccaggagcagatatgggtcaaatgaggtctcaaaccacagttggaaatgttgggaaagtctctatacaggaaagaatcagattttcctctggcactttcattaggcatgttctctgccagaaaagcctagtttctgagttttctggattgagctttatttgattaacactggtttaaagttttaggtgttattaagcagaaacagaagaaagggcctgagtggccctttcctgttacacagaaaacagcatttgaggcacataggctttggaataaaatcacctttttagtgttcttagagataacagtggctccaaagcccaccatttttttccagtcttgccaggaactttgaatgatccaataaaaggtaatgatcaaaggtttcaaatgcaactgataaatcatatagatttgtattcaggatgcctgaaattgacttgtggatgtttctcatctatcaagaaggacttggtgatttgaatttagtactttgatgttgcagtaattgtttgcaactgcagctcaatggcctgaaggcattgctcatttctccctttctcttcttgcaaagagctcttgaagtattcttttacaggctgttctcaactcactgggggctgtgacctaaaatttaggataagagaatagttccataaacacttggtacagaccaacaacaatgccctaatgagccatcccaaatgtgcaccattctgaatcaatcatcccaagtccacaccctcttcactggatatatattaagattcacttcatggtatttataagggaattactaaagaaatcatggggaaaagattcctctacttattattttagtcaaggtatttcatatatttataagttacaaatatctttcaaagtatattttaaccagttcctcaatacttgaaaaaaatgctatagattatctccttttggaagataatctatttcttcctgctatttcaattagattaaattaaaacactcccaaattaaggctttctggtaatgttttctaaccgtattctgtagtttcctcaatcagttgttccactagtcatttagtgcatgcctatattctggctgagcaaatgtatcaatattcatgcaagggtgtccatctctagcatcaaaagccacgtgcccatctgtctactatgaatatcttagtcatcattttacaccaatatattatcttatatatcttctgcatctcaaaattctttttaaaattcagctcatccacagaatcttttcaggtgaactcaactattatccctttagctattccatgggttgccataaatcttatgaatatagattaacctcataaatatctaggatctaagactgtaaagtatcacaaactgaaagatcaactgtcagggcagtagattcctctataagccacagtaattgacgagattgagtcagtatctctgtgcatctactgggattgtttagcatcgttgttggtgtcacttttatgctcatttaccattaagttgcaaggctgataacatgtgctgcattagtgtgaatcgtgtttattttaaaataaatgttgatgctgaagaaaaaagtgttagttgaggggaaacaaaccagacagtagcaacttatttacatactagacgagatacccttttcatgacctccaaagttctcaggtctgggacatttcatactctaaagattacttagcttaaacatctgtctttgcgcctgtagctttgtttggttcaatttggcatgcctctgttgagtgcctattctgctagggatcctaagtgattgactaaaggaagtggcttgccatcaaacagcttacaatgtggttccaccctgttctcccagatatcactttctctctcacattcttgtttgacaacttgttttatcccgattttaaatgtccgtatttatttatttacttgttgatgattggtcttccaacaatccacagctcttcacaagcaaggcctttgtgttgtgtgctgatgtatccaaaatgcctggaagaccagctggcacattttaggcattcggtaaatatttaatgactcaaggggagacaaaatacaactacatacacaagacaaatagggatataacacaccctaaaaagatacaaaaacagatccacattttgcaatgctctaactacaaaacttggggggattgctatttaagaaaagcagcaataattttttaaaaattatatagaaatgaattatttagcatgaaaaataatcgcaatttataaataaagttaacatactagagatgacaaaatgtgagaaataatattaatgatatattaacacatgaaaatatctcgatattatacttttttctctataatttttggccatgtgttctttttttgttgttgtttgtttattgagatgaaatcttgctctgtcacccagactggagtgcagtcgtgctatctcagcttactgcaacctccgccacctgagttcaagtgatcctcctgcctcatcctccagagtagctgggattacaggcatgcgtgcgccaccacgcccggctgatttttttgtacttttagtagagacagggtttcaccatgttgtccaggctggtctcgaactcctaacctcaggtgatccccccccctcagcctcccaaagtgctgggattacaggcatgagccatcacacctggccagccatgtgttctttaatcacctctccatatgtaatatcaatttctgagagattgaataaatggataatttgttatttgctctagcatgggtaatccaaattgtttttgtttaaataacatttgggacatataaagggcttcacacatacatacttgtaactatgaaactgctacaggtttgtgtcttactagcgtgggaattttaattctgtgctgcattttcaagtatattctatataagagagaagttcccatttgtcaaggtatcgatgagaactgaattatttgcttataattgtatagatctggtgagtgaacaaatcttccatagagtagctctggctttgtgcatttcaaattttgtttatcttccagtgcccacatacttacagtactggtgcaaaaacagcacagccacatcattacttcacctggccctgtaccttagtatcatgaaactggttgaacttgcacagtgggtgttgggaatattcttatattacttaccaagatgactggcaatagattatatgcagaattgtttgtgagccacataaaaatagtccattatatatattctactatgtatataaataatccactatatctatctatcggagtcagagatatatctcatatatatatatatatatatatctatatatctatatatatatatatagtgggctatatatatatgagatatataaaatatataatatatataatgggctatatatatgagatatatctctgactccactatatatatatatatatatatgactatttttacatataggggactatttatatatatagtagaatatatataatggcctatttttatgtggctcagaaacaattctgcatatagttaatttattgccattcatcttggtgagtaatagaaacatttttccaacacccactgtgcatgttcaaccagtttcattatacagaggtacatatatattatatatatataaaaaatatgtagtatatagtggactatatatacaaaataagtatatagtggactatatatataaaatatgtatatagtgggctatatatataaatatatgtatatagtgggctatatatataaatatatgtatatagtgggctatatatataaaaatatatgtatatagtgggctatatatataaaaatatatgtatatagtgggctatatatataaaatatatatagcagactatataaaaaatatacgtatatagcagactatatataaaaatatatgtatatagtggactatatatataaaaatatatgtatatagcggactatatatataaaaacatatagcagactatatataaaaaatatatatatagcagactatatatacaaaaaatatatatacacagcggactatatgtacaaaaaatatatatacacagcggactgtatgtacaaaaaatatatatacacagcggactgtatgtacaaaaagtatatatacacagcggactgtatgtacaaaaaatatatatacacagcggactgtatgtacaaaaaatatatatacacagcggactgtatgtacaaaaaatatatatacacagcggactgtatgtacaaaaaatatatatacacagcggactgtatgtacaaaaaatatatatacacaacggactgtatgtacaaaaaacatatatagtggactgtatatgtaaagaacatatgtagcggactgtatatataaagaacatatatagcggactgtatatataaaaaacatatagtggactgtatatataaagaacatatatagcggactgtatatataaaaaacatatatagcggactgtatatataaaaaatatatacatatatagcggactgtatacataaaacaaatatacatatgtagcggactgtatatataaaacaaatatacatatatagcggactgtatatataaaacaaatatacatatatagcggactgtatatataaaacaaatatacatatatagcggactgtatatataaaacaaatatatatatagcggactatatataaaaatatgtatatagtggactgtgtatataaaaatatatatatagtggactatttgtataaaatatatatatatagtggactatttgtataaaatatatatagtggactatttgtataaaatatatatagtggactatttgtataaaatatatatagtggactatttgtataaaatatatatatagtggactatatgtataaaatatatatagtggactatatgcataaaatatatatggtggactatatgcataaaatatagtggactatatatataaaatatatagtggactatatatataaaatatgtatatagtgtactatacatatgtaaaatatatacagtggactatatataagatatatgtacagtcgactatatatattttatatatattttatatatagtcgactgtataaaatatgtatatagtggactatatataatgtatatagtggactatatatatatatgatatatctctgactcagtttccccttaactggaattccaaaaatactctgggccacttcattgccacccaatgggaggaagagtagtatggatggaaccttagtgatggaagagattacagggttaacctatagcaattaaaatattttacttatgtaaattttacaaaattatataatcatgtgatcttgttactaaggctcctcttggcatcatgtaaggggctcatgcaaatgaggacccctgaaattacatttatttccccacgcaaatctgcatctgggcattccaaagaaatagagattgtttataattattgggagtagaccttcaaagtgggacaggattacaactgattgcagtattagagaataatcatttagaggtcacatgatctaggacatttttaggtgatggcaggtggtctgtttggcatatacacctgaaaaagaatgtagtataagatataattagtggttgaggcaaacccttgaggtccttgaatgccagaacaagaaattgggaggttgacgcacacataatcaaaatccttcctttcatctctgtgattcaggagcttttatttggatttattaattcagatatatttgtttatttcagttagtactttacttgtttttttagagtgtatgcctttcaaagacctggacctttgcttgcaccaaacctcctctgtcgctttatccttaacccttgagacctagtgcatatctgagacctggcattaactaaccttaagtagcatgagcaaatttatattgtaaagtagcttaaaaattttgaaaaattgcagatttgtgaatacaactggataaaatgtgaaaactttaatagttcaacccacttcaagtggaagtcattcgtcttcagagacaagtataagtcccaataaaagtgagttaaaaaccccttcacatatttttgtagcactggctttccaatttcagctgttttccaaatactaaaagatgctttatcatgcgtgtgcttattcatatccattgtgtagtcagttgactattttgtgaattacttgcatttgtccatcatgtgttgaacaaacatggtttttgcaatctgaaatgagagaaaaatgatatgaaatgtcagttgacttgaacttccttcctcgttttatggcaatagtgggagtctcttttctaatggactcatatttaagatgaaagtttttgacttagtttccttagtgtggttttcgcatcacagtatctgaaagcatgtcctagctgctgcattcatcacaggccaggcaccaaaccgggtcaggcactcctgcggcgaaagtgatctcttctcagtactttgctataaattgtgctgctattgatatcattaccagtttttttttttatgggtctccagatttcagtgttgtgcagtttttttggcatcagctgaaaagccctatctgatgcccataaaatctatacaaaaagagaaaatgtagttgcctccaaaaacaaatgatgtaccactttcactagtcttattttattgagtattgatgggagtaatagcaatactggtaaggcatgtaaatcatctgcaagaaagactgtgtactctgggagaggagtttggatgccttgactagtgagacaagcatcttaccagatatgtccttgtgaccatgggttgatgttttcctctcaggtactcagcttccaccataccttccttttacctgtatctttctatcaaagtatttctttctgatggacagtttattttattttatttatttatttatttttgagacggaatctcgctttgtcacccaggttggagtgcagtggcgtgatctcagctcactgcaacctctgcctcccggattcaggtaattttccctgcctcagcttctcgggtagctgcaattacaggtgtgcaccaccacaccccactaatctttgtattttagtagagatggggttttgtcatgttggccaggctggtctcgaactcctgacctcaggtgatccgcctgccttggtttcccaaagtgttgggattactggcgtgagccaccacactcagcctgctgaccagtttagatgaaaagaattgctgctgcattgaagaggtgttattccccttacttctatgcacttacccagatagagaatgtggccctgccataggaaagtgtcaggtgagtaaaactagagtagaaataaagttcaaaagatttggaaacttcatttttctgggcttcagttcttttttttgtttgttgtgtttgtttgtttttgagacagagtctcgctctgttaccgaggctggagtgcagtggcacaatctcggctccctgcaacctctgcctcctgggatcaagtgatccttctgcctcagcctcctgagtagctgggactacgagtgcatgccaccatgcccagctaatttttatgtttttagtagagatggggtttcaccatattggccaggctggtctcgaactcctgacctcgtgatccacccaccttggcctcccaaagttctgggattataggcataagccaccacgcccggctacttcagtacttttattggctatctaaattagaaaactatctttttacaggtctacactggcactttgttgcagcccctcctccgtgctcatttagccagcaagaaaagggggagcagcttctttgaggtgacagtgctagaataatggttagaaggaaagtttctgacctatagtctttttgtaccatatctctgaaggatacacccatattttttcaaactcattcaacagttgttaaagttcaagataattgagaggtattgttccaggtgctgactagttgcaaagtctgttaaggaaatgtactacatgaaaccaagatgcagcctatactgtctttctatgctattaatatggattacctggaagaatgtgtttttttctacttctttctctcttctctaatttgcaagaactttagccacttgcagtttactttcatcatcaatgtaaaaaatttaccaacttacatgtattttaattcagagcattttcttctgttcatatttatcttgttatcctaagtgtcaacagtcgtggaaggagagtgtgttttttttttcttcaaactgtccaactgttttggtagcaccaaaggaatcccttagggcaaaggaaaatcgagactctgaaaagaccagccccctaaagaggagtctctttgcacataaacaggttatcgtgttaatcccagttcccttctccatgctttcaccccacccatttctctgagcactcctctgtgactttattaaacaataagcattctatatttctttctttctgaaaattctgagagagtatgaaatcctggcttttgcgttattttgcatgcgatgccattaatagttctttactgattcctcctttttattttcctctgttcacttcatgtttgtatctacctgctcattctagaaaccaatatgattttcattatcagcttcatattcatctttgtgaatgcccaccctattgaaaatctagtctttggtttctcacgcatatcaagacattttagattaaaagcaaataattctaacagtcagtgggctgaagccaagatttgtattttctctgagacaaatcatagcagttgccaaaacctccctattgctcttcttcaagccagaaatgagaatgattttaggtgtctgttttatgctccttctcatttgctttttatgtgtagtcagtttctgaattctcctgtgtcctcctccaggttctctctccatttctgcctgtgactgctgacaccctgttcaccttctccacgttgcccttctagcctctctgtgcgtgaggtcctctagttcttacagaatgtcttgtcagtgctttcaccgtgacctgccccccaccccgagagctgtccaggtgtcagtcaccctaggatgaaatgacaccaatattggtgacaagctggccttctggttatgctcaggagaatcattaaccatctttaaataaataaatccctgctgctactccccatacaatttagaacatgtgccttgtaacttttgatgtggggctcttgtttgaagccattgttgttttccctgctgcctgcatcatcatatgttatgtgattcttcaggaccttggtttcaatctctataactgcctatccttcaaaacccccaaacatattattaaatgacgtcacctgtcatttaagccatctccatcccaaacatatcctccaaatgaaaatccactgagagggagagggagagtgtgattataacaaagagacagaaacttatagaggtagcaccttacatttttgttggtctttatatcttgcatgattcattggtataccaatttcaccctttaactaatggctgccactttcaaaattgttttcctcaaactgaattagacgaccctcctcttggcttccttagtgacatttaaaggggacatggatcagtacctggaccccatttaataccagctgccccaccattaaaatagtgattactggagaattagaagatgcaccatcattcatagacacttgggaactgacttcactttctcctatgaggacgtggcttgactggtgttaattggcctaaattctgttaaaacctgacaaatcttgccatcttcctaaaggtctgtacagtaagtgagtgtgtaagtttttcctgaatgtggtataagtcctgaatgtcagtggagaatattctagtgagaattatgcttatcctgatatggcaagatcctatctggtgaggacatagtcaccagcagctacatacccaatcagggactcttctattcctgcatctagtagctttctctttggcttccattcagtttcaagtatcaactaaataaaatggggacttgatctagcctctggtgtatgttttcattggtgtgtgttctccaataagccacgtataacctacttgaacactttagtggtacctgcctttttgtgtgctggggtgtactgaaatgttcctcatttccacatttccttttctgaaagataacttgagagtggatgaacaccatgactgctgatcttaatatcctcatcccttctccctgtcctgatgcataagggcaacctcaaatatttaactgtgtgaaaaaaaaaaaaacccagcaagcagttctataagaatttatgctttaaaatactgaacaattcctattttatttgtgctttgcttccagtggcttttaaactatgattctaaggaacattgttgttccttgagctgaatctggggtttttgcctctaaattccaataataagtcttttcttaattagctgaaaaaaaactaatgaatagcaaaattttcccatttttgaactcccttctcacctcatctttatttgtgtaaaagttttgattcgtattgtaaggttatatttgttttagtgcaaggttagattttattattttaatttacaaattattccatgaaaattaacttgactttcaagagcctggctttttaagcagacgagataacacagctcacaataaataacaagtgctattacctacttttttgggggagggagtcctgtatgaaaattacataccagacagttccatgtcctatgcatgccttaatttatttcagcctcccatcagttctgttatgtgctatgttcaccaagttttaagtgatgagactgagtcacagagcagtgcaagttcaatgccacagagcaaacaaaggctcaatctgtttgactccaaaacccagggtcctctccactgtcctgacacatgacagttagcagtgttagtgtctaattgttactgttagatttataagcttcttcactgtagaggttatgtttcctttactccctaacactggaagcctctatgaaactggatagagttgtcccctctcatttcagttagctttccttgtacaatatgacttctactctaccatatattcaaggttttgcccaaattatcttcagtactcctaattacctgccctctgttgtgcattaggacttacctttctttgtcttttttttaaattttttatttattattattatactttaagttttagggtacatgtgcacaatgtgcaggttagttatgtatgtatacatgtgccatgctggagtgctgcacccaccaactcgtcatctagcattaggtatatctcccaatgctatccctcccccctccccccaacccaccacagtccccagagtgtgatgttccccttcctgtgtccatgtgttctcattgttcaattcccacctatgagtgagaatatgcagtgtttggttttttgttcttgagatagtttactgagaatgatgatttccaatttgatccatgtccctacaaaggacatgaactcatcatttttatggctgcatagtattccatggtgtatacgtgccacattttcttaatccagtctatcattgttggacatttgggttggttccaagtctttgctattgtgaataatgccgcaataaacatacgtgtgcatgtgtctttatagcagcatgatttatagtcctttgggtatatacccagtaatgggatggctgggtcaaatggtatttctagttctagatccctgaggaatcgccacactgacttccacaatggttgaactagtttacagtcccaccaacagtgtcaaagtgttcctatttctccacatcctctccagcacctgttgtttcctgactttttaatgattgccattctaactggtgtgagatggtatctcattgtggttttgatttgcatttctctgatggccagtgatggtgagcatttcttcatgtgttttttggctgcataaatgtcttcttttgagaagtgtctgttcatgtccttcgcccactttttgatggggttgtttttttcttgtaaatttgtttgagttcatcatagagtctggatattagccctttgtcagatgagtaggttgcgaaaattttctcccattttgtaggttgcctgttcactctgatggtagtttcttttgctgtgcagaagctctttagtttaattagatcccatttctcagtttaaggtggaactcagtctcttcctgacagccaccttcaaatagggtttagtagtttagaaaaacattctaggaagggttgtttaaaagtctgagataacagttcatatttaaagatgctcattattaatttcaatgtggaatgatttgcacttgttattaacacatttagagagaaagaaaaattagaagatactcaacaggagacattcaggtgtggagtacagaaaagccgagaagaagaaagttattcctgatatgtttaagaaagatctagccatcttaaagttttttttttttttttatgtttcaaatagctgatacactggtacaaaactgaattgtcatcttctaggatacactataatactatggcatattgattgaatacacaaacctgaatacttatcattattattactattattattactattattttgagacagagtctcactctgtctcttaggctggagtgcagtggcgctatctgggctcactgcaacctccgcctcccgggttcaagtgattctcctgcttcagcctccgagtagctgggattacagttgcgtaccaccatgcctggctaatttttgtattttcagtagagacagggtttcaccatgttggccagactggtctcgaactcctgacctccagtgatccacttgcctcggcctcccaaagtgctgggattataggcgtgagccactgcgtctggcatgaatgcatattattataaaattatatcttaaatattttagtgtgttattatttaaaaagcagatactgatagtgaatgaggactcataggcatgtgtctttaaatttgaagaaaaattacctactgtggcttttttaaagaaaatgtatttattacctaagaaaaaccatgtctctctctctctctcacacacgcacacatacactctctctctccatatatacacacacacacacacatacatatatatacatatacatatataaacatatatatatgactcagctgcataaaacaatgtaactaaattgttgatcgctaaaatgttcacttctgtgcctctaaatcaagttgattttgacaatgaggaaatgccttggtgaaccatgttggttttactttttgtttattttctcccattcaagattatcaacttgtaatttactggcctgattaaatgcttggaaataaaccagagttcttgaattttgccccattttcttaattttaaagataatgagttcctttgaggatattgcatttagactgacttgttcatttcatgttgctggtaattgaggggcttaatctgaaaggaacttagtcttcagattacctaagggacagaaaaagatactggtatgggactgggatcctactttcttaaaattttatggtactttttcttgcttctactcttcttgttttttttttttaaaaatgttttatttcaaagaacaattgccaaccgtacaattattggtatgtcagttggttaagaaatgtttgggatggaggtggagggatggtgaaaaatgtagtgatgtctcttaataaaaaggaaataaaggaatgtgaagttggactttataattccttttggcataggtttgtgtcctaagtagcatgttaatttcttatcatgaaagaagtttttttttttttttttaagaaaaggaagttctatctggacaaagataaaaaaatatttgcaattctatgttttgtacaaactaagaatgttaaagcacacataaaaaccaggtttgtaaataacctacaaagtggatgaaaaatgttcctttaagctggaatcgcttcagaggtttggggaatcattttcagaatattgagaaatgagaaaatgcatttcaactgttttctactcttttcccaaaagtacaaaaataaaacgctaatttttatatgagagtgattttaaaaccacaagcagattttttttgagatgtttctctgtagtggccaactttgtatgaagcaaattattttaggcctaattgcagtcagagcggttaggccgctggctctgctaaggttgaatttcatttgaactttctaatagtatgatcttttttcagaatttaataactgactcaaatatttaatagtggaagctttcattaaattaaaaagaaatcaggatatatttttagaagaactaacttattttctttatcagttctatctactttaggagaagaggaagagaatggaagcaatctctttgtgtacttaaataggcattaatgttgtaaccccagcaaataatttattttggtctatatcatcattcaaaagatttggaaagcaccaaatggcagtaataactatacttccagctctgttgaatggcaaattacactgactgtgtgaatcccttcattcgtctcctggataatcattctttttaatactcacatatattttctagatcagtttttagattgtacacagtcaacttgtgcattgcctaacagtttctgttaaacacaatggcttgttttgaaatgcaactggggaaagatgagagttgaaagattttgtttccatgtgtcaacctataaatagatgacaaaagatcattaaatggattaatttacaagcatccttagaaatagaatgtttttacataaaagcctgttgtaaaccttttaaattaaagtgcattgtgtcatgcactctcttcaccccagggttcttttgacctctcacctctcactttgtcttccaggcactccactgctggtgaggagaagcagtgacccagtgccaggcccacctgctgatacccagccaagcgcttcacaccctggtggccagagtctgaaactggttgttccagtaggtatcctgctgcttgtagttctaatgaaagatcaaagtgctgtacccataggttaagtgggactttgcagttttaaacacattgataactagatagagatcttttgatagtatatatagtattagttatactaatagctagtatgggctattacttgtatatagttatagcgatagctattacgtatatggcactgattatgtgccaagtactattttacctgttttatattaagtcatctaaacttccacatcaaggtaagcacatgtttttatctccatttaactgataatgaaattgaggcagaggaaggtttagtaatttgtttaaggtcacatagctaataagtggcaaagcaaggaatttcacccaggtgttctggctccaaaatccttgcttctggccagtacactatactgttacatttccttcatcttccagtttcgtaatgtccaaggatatcattatatttttgttgtgttaacccaatgctttgcaaaaccataccatgtgagtggtgtacattttcaagctcccaatatcacgaaaatgtggtgccaggattggatgtgtagaactcagcattcagattgaagaaaaacaaaatcattgaccaaaagtgcttataaccagatatacttataactaataggttaagtggagaataatttcctgaagagatgatattctccttccatataggactgtgggatcttcctgctaaatcctcagttgctttgaagagctgtaattgtgaataatcctctcagatagcctgagaattcaattttggctaatgactatataccattgcaataggtaatcttcgataacatagccatattaaaaattccctaaaagcaagactctttctcactttaagtctcactgtctataacgccttaagaaaaaataaacacatcatttataggtatatacggatgctgaaatgagttaaacaggtttttctgatttggtataaaatattcttatcaagaaccaatgtcaatgtgtatgagataggagtcactatttgaaatcattagctctttgctaatagatttgtggcaatattttggcatatttcttttattattaaaagaaagcaggtgtcttgaaagtattttagatgtaatgtttttccactaacctatttaaaactctatccttctaaggaaatatatttgatggaacattaataaaaatcaggtgtatgtgttctattttaatgtacgtacaaacaaaactggtatgtggtatgacttttcttaaaacacacactggttgagaccatgttgagtctaattatgttggattgggggaagacagctattcagtgagagaagaattacataaaagagcagaactacaatttagttttcattttcatgatgtctgtgtgtctgtgtaccctaaaacgagagtgtgtctgattaatgtgttagcattgtttgcatggagaaagtccctgtatttgcccattttcacactgctctaaagaaatacctgagactgggtaatttataaaggaaagaggtttaactgactcacagttctgcatggctggtgaggcttctggaaacttaaaatcatggtggaaggggaagcaaacatgtccttcttcacaaggaggcaggagagagaagtgcagagtgaagggggaagaaactcttataaaaccatcaaatctcataagaactcactcactattacaagaacagcatgggggaactgtgcccatgatccagtcacttcccacagggtacctcccccaacatgtggggattacaatttggtttacaattcaagatgtgatttgtgtccggacagaaaccttaaccatatcggtcctccaatgtttatttccatgtttctatcacttaggctctgggcttaaaccaattaagatgacatcaatgttactttccctagaggaaatgatggctactgtccatctggtaaatgctgtagccccaccaaaatatgacatcagtgagttccaagttggggtatggggcagaaagacatattattactagcaaagatgcatctcataattcaagaataaatgctggcgcccaaaatccttgtgccttacttatgcaagtgatcaaatatgggctgagtccctgtgtatcaacagtgaaaaggaaacacatgtttcttcctttcctcatagtgtcctctgtggatgatggagtgcagaccacagacccaaaaaggagagtctggtccttgcccttgcatggaatagtggcacatcttaggtgtctcttgcttcagttgtaaaataatctccatgaatactttaagctttaacatcccaaggtacagacattgtgccttatgtatctttatctagggccaagtacatggaagatgctcagtgtatatgttttggacttaggaatgcaagacacgtgtaagtctaggaagagtcctaaaagttcttagaaattaaccagctaattaattattattaattaatatatattaatatataaatatataataatactaattaataataattaatctgactcagccattctctccgtttcccaaagagcatctaccagggaaatgtttatctgctccaaggtctagttcaccacaggcaagtgacagatagtttaacttccctattatgcaaacattaataaagacacttaggtgtgtttatttttactagaaggaaggtgtgtgtgtgtatatatgtgtgttataactgttaatatatccttgcatagccaaacttatggaatgtttagatctacagtgtctagtttagtagccactagccacatgtggctattgagctcttgaaatgtgtctgatccaaatgtaaatgtacttaaaatttaatatacacactggatttcaaagactgaagcataaacaaaataacataaaagatctcattaataattgttatactgactatatgtggaaatgataatatattaggtatattggcttgaataaaatatattattaaaattattttcacctgtttttacttttttttttttacatggctattagaaagctgaaaattctatttgtggttcttattctgttttattggacagcgcagctctagacagaagcaaaattgggtatagcatgcatgagatagtttgagtcctggggaagatctttgagcctcacatcatctcttgggcaacagtgcaattcggtttgcctggggcagtcctggttagtgcccgttgttctggcataattattaataatgtcttcacaaactgtcagaggtgtccatgtatggatgataaattacgtggcaccctgcatatagccctacgctcacttttattgttcgctcactgataagagaagcagcctttcaaggaaaccttgggaacataacaaccacaactctaacactggtaccctgcagaggaggttctgtgtggcaaggacctgggactggagctacggacactgagacttcacattcttttccatctcttggattttgtacttggcgcttccttcacaactccagctacaccattcttgattcctatgatttgataagtgatggtgaattcggggagtgtgtgataatgtagccatgtgtcaactaatatgaaaaataattgcttaaaaagccatgttcaattgcatttcagtccaatatccacaggaagaaaaaacaatcaaaatttccatctcttcaagagtgttcacgtataagtaattcacagatggcagagccccaggtgggttatgttcagtcattcccaagaaatgaaacttacttataacccacagcataagaagctgtaaggatgaatatttgacacatttgattatgttgaaatactgcctttaaaacacagttgatgactgttatttttagttgcacttcattaggcttactgtagagggaagagttttcattgatgcccagagatgtgtgtttttcaaaagttgcaaaagttacacttgttttctagctgattaaatttattacaaattggttatttaagatgtacactctcagacatgctggagttttaaaaagggcttaaattagaaaaatcagattctctgaaagcttcaaattctatgtatattgagaagccactaaatctggtatttgttatttaacaccagacacacagcaaagaaatttgtttcctttgttcctcttttggtcaacatacctaattatcagaatagtacaatcattaatgtgcaaatagtaataactgtttatctttcaagacagtatagcaaatccaactctattgactgcttttgaattcagaaagagaatcctagaaacaggatattttggtgagagtctgcttgtgggacttcttaccttccttttcttgattgtaacctggtgttcttggcttaagggcatgccataaaacaaggttcttgaaactgatgttctcaaacttgcaatggaacagaactctaaaacagatgtgatttttttcttaatatccggttaactagcaaggttgttttgtgttttaatgactgtttatggtttttaatttaacccttaaggcaaattgatcctgcagggcgagaaaattaaaaactggattcctgaaaattataatactgtggttgttctcagagagtgaatggcattatttgttctaaaaccattacttgtcttacatcaccaaaatacttgacctatcttttcaaagtccatgtgtattttatatatatatgtatatatatatatatatatatatatatatataaaattaaaaaaataagctggcagatttgggggttgttaaattagaagttcatggatagatttcaggggggtctgttaactctctgaagttttatgccttagccaggggatgggggtgtgtttcatgaaagagattctattacttcagattttaaaagaataacaaaaaatcaaccactgtttgggggttagattaaataatgtagggaagccactaattctcacagtgagcagaatgagagaagttaagaagtagagaattatcacttcctccctgcaaatatgtattaaataatgaaggttagttcatcatattatcacctgtttacatgacacataatatgtaagttcaagattttaagaggaatagaagtttttgcattttttcattgagaggctaaaaataactctttagtcagtatcaacacaattattagcaactctaagattgggggtaaaggacacagaccggtggagggaaaacaccctgaggggaagtgtttccagttgtcctgtgtgttctactgagacaagaagggaaaatacagtgttctttggggcttttggtatgttatcagtgaggatagtggcaggtggctgctagtgagagtgcatttttacagtgagtggctgcattctctttaagtcttgctaagataatatgatgacgtgttgatttgaggaatttcccctcatatgtcacacattttcccatgtttgtcacatatattgaaattattgtcagtattgcccctgtattaaacttcctcagacccatgaaagaaatcaccgagatattacagagaaattcaaatagcttgatttcagggttaaaataattgatcgccactgtgatgttagaggacttttggttgcaggttgctgactatcaaaatccaacataaggcagggtacagtggctcatgcctgtaatcccagcactttgggagactgaggcaggtggatcacctgaggttaggagttcgagaccagctggccaacatggtgagaccccgtctctactaaaaatacaaaaaaaattatccaggcttggtggtgtgtgcctgtaatcccaagcacttgagaggctgaggcaggacaatcgcttgaacctgggaggcagaggttccagtgagccaagatcgtgtcactgccctccagcctgggcagcaacagtgaaaactccatctcaaaaaaaaaaaaaaaattccaacatataacttaccaaacattctgagtgaccaaatcatatttttctgtagaatcaaatatctgtagaaacactggaacaaaataaatgttgtgggtactgatgtgtattagaaggatggctctatccattgttttccaaagaggagagatggatgctgaagagcaaaacagggggagaaatagcatgtaatatactactgcattatttagagatactgaaactataaaaggtttttattttttttccccaccctgacacagtgatttaataatagttctggtgtttgtaactccagctgttcacgctgtgtgctgataagaccagagcttgaagacacattgcaacgatggctttcatatggctttgtttttaagagataaagctgccatccgatatttcatggggccaaatgtttacttcatttggcaagtttaggcagcttaatttttaaatcagttatgcttgcaagactcaagtttcaggtaggaaaaaacctgaagcccagtttactctgcagcagagtttttcaccatatctcagcagaagatgttaaaacaaatctggattgcctgaatgtctgtaccatgactaatcaaggaaactaagaagtgagatccctatttaggtgtgtgctccccgatttttcttcttgggtcttagtctaacactgaaaaactctaaaagaaggatcactatttaggtcaatttcagaaattaacaaggtaaccatgacatgtcttttatatatatatatatatatatatatatatatatttttttttttttttttttttaattatactctaagttttagggtatatgtgcacaacgtgcaggtttgttacatatgtatacatgtgccatgttggtttgctgcacccattcactcgtcatttacattaggtatatctcctaatgctatccctttcccttccccgcaccccacaacaggccccggtgtgtggtgttcccctttgctgtttagccttgatctgcacacaatgaaaactgaatgggttttgttttcatgtcaaaataaattgactaatcccttagatgcccaagatttctgctgtgtgctttctagaaagcctaagacatggttcctgtcctcaagaaacttacaacctcgttacagagaacacatctaaagcagttaaacagccctagcagtctgcaagcatgtatcagattatcaaataatacggttttaaccatcaaaatgagtggttttttttccctttagcctgcactttggtactctacttagccttcctaacccctgaagggaattgccatgtgcagtatctctattagctgttatctctctgaaatataatgtttacatgactgcattttttcaagactgtgaactcttcagaggcacaggccagtgtattcgtttttgtattcaagcccccaggcacagtgcctggcacttaagacgttatcacaaatatatgactagatgataaaaatcataaaatctagaatcataaagttagtaatctttgagttataactttgtaattttctaataactgttcaaaacatttagaaaggtcttgattagaagtttctggataatttcttatatccattacatctaaagatttctccttctaaattttcctcctagtccatctcccttaagaaatttttctaatttcagttgatttggaagaaaataaaaatacttctggtatgtgaattaattaaaaagaaagaacatttacgacgtgtttcttggcaaagcactgataaacatctcaatctcactttcacaatatgggcagatgtaatttgacagtgttgtttgaaattttgtaaagatgatgtttaaagtagttttattttaaagaccaagatcctgtgtgtgattgcatcaataactctgtgaccctaagaaaattagttaaatagtgggtgatttcctcagaaattctatgtaatggaagggaaataataaatagagaaactgtatgaactctagttgttcttagggacttatccatccaaactagtgacttcaagattccagatgtgaattattaagttggttggtatgagttcaactttagatttcattttaatgtctcagtgttcataaccagtcatgcagtgaggttatctttccatccaaaacaccaataatcattttttattggtcaaatgaataatatcaagaaatattttttaaatgccacacacacaaaggcagcagcgtaaatgcctacatatgcgtatgtgtgtacccttaccctctttggagggaaagctactacctaaatttgaaggctaaagtacatatagtcatgttatcgtaaagtgaaagttaagggtatgggttgtgtcttccataggttctgaacttctgtatgtaccttccaaattgtggacatttagtaaagactgatgacataggaggaaagggttaatgagagttcaccttgagaagaagcaagacaattggccttgggaggagaaggaaaattatttctttgagcatggtgtgattcatagaactctcttacgataggggacgtttttttttttatcacagcataaacgcttctaaagtacaagtttcaatttggtttctgctttcaaaatcttgtcatacaatgacattgtacagacgtttaaaagagttttatttcttaggagagtggcccctttcctaatagctctgtactttaaaatagaattcccatttagatgaatcacattttaaaaagtagctactgtgagtgttttacgcttgtggaaacatatagcatcctcataagcagcatgagagcctgtcaccatacagcttttgatgtctgattaaatgatcgtagggacatctggagggagttagttttgaagtaactggtgtgaagcactggagaatccgaagccttctgacagactaaaaccattaaaaaaaaaaaaattgctacttttagcaaatcttttttaacttgaaactggctggaaattttcagactcacatagccctgatatttctcaacagatttttcagacagaactctctacgttttaagcaaagaatggttaagtagcatttgttgcaaaaatcataaaggaatatcctttgaaaggaaaaagtagatactgaaagcaacagaagtcaaaattgatttacttaaagaaattgtctcctttttatctgcctttaattttaatcagtgtattttaatttttaaaggacacaaacacacacacacacacatacacacacacacatatatatatatatatatatttgacattcagctatattcttatgaagacccaaaggcatcaaagcgattgatattgatataaggttatggcatgttttgagcacctgtcaaaagtttctaaatgtcttgagtcaaaattttatttgcatagtctcataaaatacaggcattgtttatttaaaggttgtataatttgtaatttgtccaccgaggttctcctagtatgaggtgatttcttattgtttcatgaataaaattatgatatacctacatatatgaatatatttacaaatcctgaccttatgtatgtatatgtgttatatacatatacatgtgttatacgtatatgttatatgtatgttatatacatatacatatatacatgtatgtattcgtatatgtatgttatatatgtatatgtgttatatacatatacatatatacatgtatatgtgttatatacatatacatatatacatgtatatgtgttatatacatatacatatatacatgtatatgtgttatatacatatacatatatacatgtatatgtgttatatacatgtgtatgtgtatatgtatatatacatatatgtgtatgtgcatgtgtatatatacatatatgtatatgtgtatatgtatatatacatatatgtatatgtgtatgtgtatacgtatatatacatatatgtgtatgtgtatgtgtatacgtatatatatacatatatgtgtatgtgtatacgtacatatacatatatgtgtatgtgtatacgtacatatacatatatgtgtatgtgtatacgtatatatacatatatgtgtatgtgtatatatgtatgtgtgtatatatacacacacgtgtgtgtgtgtttgtgtgtatgtttatatacatctcctgccttgaaacccttgatcattctccactgcattcaggatgttttaaaatttcttggtatggctttttaaaaaaaagacttttttctcttttttaaattgtggtaaaatatatatatttactgtcttaacaattttaagtgtatagttccatggtataagtacattcacattgttctgcatccatcactaccacctctctccagaactcttcaccttccaacactgaaactctatactcttaaacagtaactccttattccctccttttccttggcaaccaccattctgttatactttttctccctatgattttgactactctaggtgccttatacaagtagaatcatgcagtatttgtccttttttaattgtatttgtccttttttgactggcttattttactgagcataatattcttaagcatcatccatgttgtagcatatgtcagaatttccttccttgttaaggttgaaaatactctgttgtatttgtatacaaatataccacattttgcttatctactcatctcttgatggacacttgagttgcttccacattttacctaatatgaaaaatgctactgtggatacgggtgtaaaatatctcttccagactctgctttcatttctttccgggagatgtccagaagtagaattattggatcatagggtttattctaattttcattttttgaggaaccaccaaattcttttccacagaggtgtgtcattttacattcccaccaacattgcacaagagttccagtttctccacatccttgccaacacttgttggtttctgttttgtttttagtaatcatcctaatgactgtgaggtgatatttcattgtagtttcgatttgcatttccctaatgcttagtgatactgggcatctttttaagtacttattggccattcatgtatcttctttgggaaactgtcttttcaagtcctttactgatttttgaattgtgttcttcatttatttgttgctgagttctaggagttttctatatatgctggatattaactccttatcagatatatgatttgaaaatatttttctctttctttacattgccccttcactctattgtgtcctttgtgcagacatttttaattttcatgaagttcaatttttcttttttttttttaactgtgctttttgtatcacatccaagaaatcattaccaaattccacattatgaagattttgccttatgttttcttctaagagttttatagttttggctcttaggtttaggtcttcgatttattttgagttaatttttgtacacggtattagataagggtccaacttcagtcatttgcctgtgaatatccagtttccccagcatcatttgttaaaaaggttattctttcccccattgaatggtcttggcaccactgttgaaactcatctgaacataccttagagggtttatttctcagtccttgatgtggcttttaaaaacttaatcacaacctatatgcttagctttatctctagtcacactgcatgaaggaccctatgtatgagagttataatttttcacatgtgcaaagaaagcttctgtctgtgggtctttgcccagatgtttcttctgctggaagaatgacaaatatcatttgtctccctttctgctaatgaatgtacaggtacccttcaaaacttagtgtaatggcctctttctttactgatccttatccacaccctttctgctctggacagaatttaccacttcccactgatggcatgctggaatacctctagcataatttgttccaccccatgttatagttttctgcatatgtctcctttatgaatctagaaacttgtaggtggcttgaatttccttccacattagaacacggcatcatgcccaacagcagcatttatatattgtttaaggaatgggggaattttctaatcacgattgctcatttcaaccatgaagcaatttaatttcagctttaatagcgttaatttacattctacttctgctagcgagtagccacgtaatactacccagcacaccttggaggagggctacttttctctttcaattccaagttcatgtcagtcgtggacacttaattattaatatatgtgttcaaatatattatttcatcccatgaacatctgcaagttcagctttattgcctccattttacagacgacgaagttcaggctcaaacgagttaacttatttgccttagatcacagaactaacaagtagcagtgctaggattcagatttatcttaacctgcagtatagactcttcattctacccctcaaatcaaatgttagccttgagagtagcatttgtccacattatgctgccattgctttgggcaatcttcctttgaaactgcctcaaagccagtttatcagcccctcctcctaaaaaaagtcatttcatcattttatagtcactatttttccttcaaaaatggtggcgttctatttgatgccaaaatctatattgtacagttagtctcagactgtttacacaatttagatacctctgtgaaggagaaaatttttccaccacaaaggaatttaatgcaggcatttaagacattcatattcatagaagaatgcattcagatgggctgaaagcagcagagttttagaacaattttttgtttattcagttgcctagtgattaagacatgtaggttttgtccctgactcatccattgactctttgtcaggttaagcaagtgtaatttagttctgtgtctggaaaaggaagattgtcttctatattggccacggtggaattgcaaggttaatgccttctatcttgagtacagcatttagcagactgtgggtgcttaatatatgttaataatagtgataataatgaatgttgataattaaaggtcttttataattactaaattttctatgtgtgttaaatataattaaagggaaatgatttaaattaatatgcatacatataaaaactagagctagccacagcttttatttttagcttctcaactaacgtcatgaatgtgaatcttatattaagaaattcaattatgatggcagtttcactagggtcatgtatagagaacccatgcatggttctactctggaaactagaaaggcaatttgagttgaaaaacatgggcatgaatgggaagcttcaagggactttagtggttggagcttgaccaaatgaagttgtgcatcggatatcgttattatgaagtatctccataatactccctttgagttctactgggagtcagaggtaccttactggaagctgggcaccatcccagaaatacagataataaacaagactgcctggagggtctatagaagatataggtagaataaaggaaacagtaatcataaataataacccaggaaattcagcttggagattcattctttgaactcaaatgctcagggttactaaaggttattatttcttaaggttctggcatggcagtggaagtgtgaaccatgagatgtggaaggctagagtggttaagaacatggactgtaaacatgactgcttggttcaaagctagcttgaccactgactgatttgctggtcaatttctgtcaagtgtttgttttccttcttttggtctcacttttctcacctataaagtaatgataataaaagtacttacctcacaggattgtcttgagaaattgatgagtgattatttgtaaaaattcttagaacacatggtaagcactatgtgtgtgtgttaaatacatacgtatgttggatttgtgccatgcatggttggatagaaggtgtaggataagatagactatagaagtaagttggagagtaatctgcattaaaagctgaatttgatcatctttagctttaatttacagaaggcacttagcacacagctagcaaaaaatattgattccaaagtcgagcattaaatgcatactgagtgtcttttgcttatagagacccttgcaagttcttttaatttcaaaaaaaaaaaaaaaattcctccaaaggcaagttcttaaggcaatattggaactacatcaatgaacccagccctggctttcttctcttgatatgaaatgttgtcttccttataattattttgtttaagttgaaaacctagaaggaaacaggaaaggacggattattaagcaacaagccagtttcaaatggttcaaacctgtcatccatctcctgaggttttctggaagcccccttcccttgtacgcttctctaatttgctagtcctgctgcctttatcttgactcaccttcctcacttgtttacagggtggatatcttctcattcattaagacaaggttaaaataccacctcctttttctatcccttttctgaaactctacttccaagcagaagtgtagtatttttttatgtaaatattttatgtaatatttttaaagcaatgtatgataatacgttcgttgaggtcgtaatgaaagtatgttattggagaaattagtgtttaatataggaccaaaataacagaggtcagacatgagtcacagagagcacagtgtggatgccctcagatcacacacttgttcctggactgaggcatgccctgctgtgcccacagagctacctgttccctcctcagttcctgctccccgctcccacccaaacccagaaagagtgatttataattctgtcacaaacagtaggaccactcttatttgcatttgtgtgtctctttccttcccttccttcccttggagtggaagtgcactgaggatggagaatgtattgttttttatctttgcaggccagcagtagcatgtggtaggtatttaataactgatgattgaataaatgaaagaatgcataaaagaagtaatggataagcaaatgaaaagaaaaaaagaataaattagcagagagaaattaagaaaagaataaaatgtttttaaaggtaatgtacagtatatttttgtatcttttgcagtgctcagtttttaaaaataaacaaatgtattttaatttattcagcatgaaatttatttatatcttatatctatgtctgtataagaaaataaaacagagcagatacaggtctctgagagtattatgacatttctgcatttttaatgtacttcaaactccatccttccaagtcagcttctttcattttaaatatagttgcagtgggggtgagggagggggtttgcttggaaattattgtattattaattaatctattatatatattcaactttagtctctggtcagtgttttcttagcaatttgcaaatatgcaattatctctgtatatttgggatagtagttacagaaactaccaaagtaaccgtttaaagctaaaatttggaattttatcactgcaaacatttatctttgtgttggggacatcataatccttgtagctattttgaagtatataatgtattaaccctaatttgatcattatacgttgtatgaatgtatcaaagtatcacatgcaccctcaaaacatgtacaactatgatgtactaataaaaaatataaaaaaataaaattttatattttaaaaaataaagtcaaaatttgagttttcctggatttctaaatttgtttgataaattaatgaactagaaattagtctttgcaaggaccaaaggatgcaggtagaaaaatgcttaggagtttgttatgattcaggtcacaggaggcaaccacccaaattaccagcatgattcctttatccgtgtaactcagcagttgattcagtaataattataaaacacccacaactacacttattttgtgctagttatttttctaagtgctttaaatatattatttcatcgaatcctcttaacacccccatgaggtggtcccattgatatttctgttgataaggaaatgaggtacatagaggttaagtaaatgtcaaattgtttagttgtaaagcaaataaatggcagaaatatttaggaaataaaatgtacatatcttggataagggaatagaacatataagagatgtcaagaataattcccacttttcatgtttgggtagtaaagcatgtaggtattctaccaactgacatacagaacataggatctgtttgtaggcaaagatacaagtagagatgcttggaaataaaaaaaaacgcatatccaaactttgaagtcattggtgatttcagaataagaccagtttctataaagggaagtgaggtaaaaactgttctgctattagttggaaaagatactggaggcaacgcattgggaacagccctgtggaacttataatcgcattgaggagaacatgcacaggttaaattttataagctaataacaatttaagaactaattccaagtggcaaaatacaatttaaaatggttcagtggaaaaacaagggacttttttatttttttatttttttgaagaatggcacatgtaattcatgagagtgttgaacatctacatcttgggaagtgagagatgcagctgtgcttcaggaaaaagtggaatctgagatccaagcaattgcttctgcttcactctttcatagatttcatcatgtttacctgtttacctgcccactgtcttcctccacattggggagacatgcgtggctgctaagaactctgcttttcccatctgcagagaggaactaattccttcctaagctttagggaaaaaaagtctgattggcccagaatggccactttacccaagctatggcactttaaatcaaccatggcaatgggggtgtggggaatgttctgcagacatttgatgtatgatgccagtgggagaagagcagttttcaccatgtggaagactgcgcagacattcccataagtgtatacccagagtcaaggccaggtatgaataatcagtattggcagtgagtgccgtaagttcagggaagaactcagtgtcatgtggtcaagggagcttcaaggaaaaagatggcttgatgtggactttaaagaaagggtagacatttgataagcataaaaaagtcagtgtgcaaattcacagcaacaaagatgtgtaagtcatgttgggtagaggaagacctttctgggcagagttaaatttgaaagcactgtttctcaaagagttatcaaaagaccccttccctcagaaacaccaaatggggttgcagaaatgctaatttgagggctccaactcagtctgttgaataaaaatctttgggaacaaggtctgggaatctgcatcttagacaaatatcctttagctattgcagtctccagtgtaataacagcatggagtgaatagaggttataaagaaaggctggacctggcctcaatagggcaagctgcttaggcacaggaagatgaggtcagctatttccacattggtgcttagagggaagaaacccttagaagcaccatctttatgaatttattcaaagatgccacagatagagtgagaagattacaatatatctgacaaattaataaacactggagttgtgaaaaacaactgtagaattttgcatgaaattgtgaagttgtaaaaacagaaacaaagtgagacattctgttgacgacaacagtagtgataaaacacacacaaaaaaagctttttgtttccatagaataatttcacatggccataaagatatcctgacccaatatataatttaaaccctaaatacgtattttttatttcattctgtgctatggtttggttctagtttgtttgttaccatcaaaagtcatgttgaaatttggtccccagtgtagccgtgttgggaagtggggcctagtgggaggtgtttgaatcatgggggtggattcctcaagagtggcttggtgctgttctggtggtagtaactgagttctctctctggtgagaatagattagttcctgcaagaatggattagttcccaagagagtgggtagttataaagccaggatgcccaatggattttctctctctttgcattttttgcttctgctttaaccttccctgccatgttgtgatgcagcacagaagcccttgccagaagccaggccatgcccatgaactttgcagcctgcagaaccacatgctaaataaatattttaataaattacccaatctcagatactccattataggaacacaaaatggactaagacggcccccatttattcatacttattattatcagcctcattgaacaggtagacaaaacaaccacaaaaacaacaaaaccttaccatctccataggtaagggaattttgtctcatataggacacagaaggaataatttaggacacagactctctcgggtctgggaaagttaatgtatctcatgtaactaactgacattcaccaaacgtaagaacagataaagtttcccccgacagaccctgtgcatattttctgctctcaatttggctgaggtactaatcttaatctgattgtgttgaacagaacaacccacccttttagcatttctttgtctggcaggagtcctgacatttggtcgcatggttaacatcaaacacgaagagaaattccttctggtaatacagttaagataggtgcctttttcctgaaagttagcaatattctcactctcatggaaggctgtactgatggaggaaccaatgaagcagaaaactctaaaccacagataattcttgttatttctacctgagttgaaaatacaatgtgttcattagcagcaagtgtatactgtagtctgacaactgggagacctgccttctggtgtaagcttagagactgaattgtgtggtcttggagaagttacttaacttaccagggacagtttcttcatctgtaaaatgagaaaggtggtatagttaaaatgggagctcttgtgtagaaactgataggaatataaactggtgtaacacatttggaaatcagtgatcttaattctcaatctgtgaatttgtaatgaggaaacatgttttttctgctttttttcattttgacggtttttcttctaattctaaatcatctaaataactgatgacttaaatcatcatttaaatcatcaagttatttaaatcatcatctaagtaacttttattttcagtttttcctcatgtctttcaagtgtccaaaaataccctggatgagttgaaactgacttggagtcagcttcccctgaatcccatgcagtgcgtgaggggaagggaggttgtgcacctgaacaaaactgggggatctaatggaaagggaagtaagatgaaattatctcagtagaaactaacactctattttttggtcaccaaatatttctttgcatcttgcatccacttttactaggctttttttttttttttttttttttttttttggtttataggcattggaaatattttccccagtccataattggtttttgtttttcagagaaagggtctcactctgtcactcagactggagtgcaatgctgcaatcctagctcactgtaagaaactcaaattcctgggtccaagcagtcctgcctcagctcctcagtagctaagactacatgagcatgtcaccatacctggctaattaaaaaaatttttttgtagagatagaggtttcactaggttgcataggctggcctcaaactcctggcctcaaaccatcctcctgtcttggccttccaaagctctgggatttcaggtgtgagccacgatacccagcctataattgtttctttaattttaatttgtgttacagataaattttaaatttcagtgtttatgcttatcaattttcttttattattatagtgtatatgtttaaagaaaatttctaaaatgaattacaatattttccaatgttttaagttggaatttaagcctttaatttacctataaattttttaagtggtatgtgtgtgggtctatttttattttaatatttggcatgagaaatcagttatttcagtgccatttaaaataataaattttgtttatgaaatgctatttctgtgtttatttagatgatgctattttttcttttatcactgaaagcagcgtaattccatgaatacattttctaatactcagccttcctttcatttctatggccatttatcaaacacctttggccatgatgcattctgttttatatattgctgaattcagtttgtaaatatttcacttgtgacattatcatccacataactgagatagttctgtacttttatttcttgcattgtccctgtttagttaaagaattaaggttcatgctttacatgccctacataagcctcacaaaatgtgtagggaaacttgattgggttttctcccattatctgaagcaatttgtgtttagcattggaattatattttctatgaacacctgttcagtctgggactgtgcgtatgtgttgtttctctgtttggggatggggcagggtataggagaagatgacttactcagattttctgttttgtctagatgaatttttgtgtgttgccaatttttaaaatgtccagaaatttatttgtagtattttcaaatgtattgtcatagtcttaagatttcaaagtaatctacactttatgtgtagttatgttctccacctaaccccaatattgctaatttgtacatattctgtttttaatttttttctctttggttaatcttagtagacatttgtctatactattagtttaaaaaattgtttttaaggaaacagcttttgatttagttaataccctctattctttcattcttttccagtttattaacttttgcttttatttcctttattttagttttaagtagcctaagaatagacaaggaatgaagttatttttttttttaccttttcctagcttcttgtatgcttaactcatttatttgtattttcttgttttacatgaatgcactgaaacatgtttgtttctaatcaaagtacagctactactatagctgcatccgctaatttttgatgcacaatattttcatttgcctttcatttctaaatgctttgatttctgttgacttcccctttaccgtatgaattatttagtagtatattttaaattttttgaacatatgactctgtacccattgctaatttaattgcattgtatacagatcaagagattcatataatgctgatttcttgaaatttgtggtgatattttgtgatctagtgtatgattaacttttgtaaacattcaacatgtagttaacatgaaaacatgtctcctactttttgctatatttacctgaagcttgttcattttgttcttcaaatattcgatatacctaccttttttttttcttttactctatctgccagtttctaatagaaatgtactaaaatttcctagtgtggctatatatttgtcaaattctgcttttcattttctgaggttttatcttaagtgtgctgaggctgtttttagttgtctacagttctctatccatattagtaatttttcattaaatcctattttgcctgatacatttgcaaccacttgtttgttttggttagatttttttctggtgcatttttctatccttttattttaaacttctcagtgtggttttaccataggcatgtctgttataaggggcatatagatagattgtatttaaaaatccagtctgataatctatgtatttaaatagattagtctaatctatttaaatgtattgtaattactgatctgtttggttttatttctgaccaccattgaagtgacaggttttccccaccttttttctctttgtttcaaatctacaaatgttacttgtattctttgctcattattcataaattttagcatatatatattttatttcataacacagaaatttgaagtagattatacttactgtgatacaacaagcagaattgactgatacaactctgtggtcttaccctgggttgtctgaaaaataagctagctaggaccagagccctcacccttcaccctaagtagaagaagccgcacttgaactcagcttcaagggaccagtggctccctggcaccagcagcaggcatagtaaatttccaccgtcccaaagatttccaggtgtgaggcagctggcctttgtagagcacctcagtaaagagctagtatctacactctacactgcctcatgtcaagattcttgtttaatcccccactatcaaggctactcttatgctcatcctatgaaaagtaagagtaacagtttgtgtggcctatgtcctgtgataccccacccttggcatgtttagcagaacaccctggtctctgctcagccttccttggggtcactaggaacctataccttctcttcttcctgtctcctggcttaaatttctccaagcctgttccttaacccatttgctatgtgattgtgaaatcattctcagccctgttgcttagtgagtggtctgcaaaaggaccctacttgcaagacagaagctatgacatacaacccctaaaacttaaatatgtatctaaaacaataagtatttttaatattgtaaatataacactatcgtgccccatgaaattagcagtttttaatatcaatacttaatccacattagaatttccccagttctccagctgtttttttaaatcaggatttaatctaagactaaacactgcatctagttgctatgtcttttacatctctataatctttgttcatgacattgacttgcagaaaaccaaccagttgtctctgagcaggtcattttgcatgaatttaattgcttccctgtaaagttgtttgaattgttcctcttgtccctgtaggttctgttagctgaaagtcgtactaaagccttgcttaaatgtaagttaaacattttagcaatactatatcataggtgatatatagcaatacttcttatgtataagatcaaaagatacataataagttttgttttgtttttcgccattagtaacctaaatttgattattgggttaaggtggtgacaaactcatccatccattgcaagcatcaatatgttctacttgaaacaataggtaatcatttgtgaactaactttgtcactacgtccagttactgtcaatatttttataactaacaattttatgctgaaatactaatttcattaagttttgcagtgtaacagtttttaactatttcatttcttctacatttgctcgcactcttttataatgtagagctttccacagctttctataactggggctatttgattacctggaaataaagtgcatactgttaatgtaaaaaaaaaaaccacttaatttggggttttaaatggccagttttcaaagtaaatttgtttcttggaagtgtcaaatgatgacagaagatttttctttggcttctttcttatcactgtggactcagcctttcataaatacagtgtgtgcaaatcacccatgatctttctttctgatgtctcagctttgctgagtagaagctccttcagactagcttctgggttcttgacatgattgtattaattcttacaagtttccttcctttatggaacagcaagatttcccaagatcactatataccttcattgccccacacttgccgccattcttctcgccaaagatctgtagagaatggtcctagaaaccaaactccggtcctaggtgtgcatcttgttcctgagaacaaattacttctgtatcatgttctggccagacttagggaaaatatgtgaatatatacacttaaaatccagagttgaaatcaatgtctataattgttttatcactgagtttaatttctttgattttctaattgcttctctttcaccttgagagtcttgagtgctattaactttaatgtaagtatggatttgatttattctacaatgtaaatgtttttaaataacagcactgctgttagtacagacaacaaaagatgtaccatcaaagcattaacatgtaaagtcatttgaaataagaatcttttcactttgtagtgtatcacgtatgtgtgtgtgtatacagagatacacacatagtaatttttaaaataaattattgttatccagaatttctgtcttcctaaacataactgccacttttacacactctctctaattgttggtactctcacattgctgtctatagatccaaattttatcttaaaaaaaacaaaaaatgcaaaacactggtcattacattttaagcagatttagccacttgtttgagcaatttttgtgcttgtgtgactcatgttttctgtgaattagcttttttttaaaagctataaattatgagttcttatttgtatttcttcttaaaaatatatgtagtctcacataatagtaaacatcacacttttaattcatcttgttgtaaagaaataagatatagtttgacgatggtattcctgtcattaataaatcataggcattaaataatatgatcaaaaattccacattaaaagactgcttacattcttataaacttgtatttggacttcataattaaaataattcaggtcctttttttttttttttcttctttgagacagagtttcattcttgtcccccaggctggagtgagtgcaatggcgcactcttggctcactgcaacttctgcccccctgggttcaagcgattctcctgcctcagcctcccaagtagctgggattacaggcgtgcgccaccacgcctggctaatttttacatttttggtagagacggggtttcaccacgttggccaggctagtctcaaactcctgaccttgggtgatctacccaccgtggcctccccaaagcgcagggattacaggcatgacctacggcacccagctgaggattaaagtataggtggagacaattaaattttatttcatatcagtggttcacaactatggtacagtataatctggatattttaaggtctaaataacattttcttggtaaaacttattttaaatagaaaaattgaaaataatgaggaagaaaataatatccttctctgtaactgcattcatttactgtttaaaaaataatttgcactacttgctatggccatacttcttagtttagttatactaattctatttagtaaaagcgacgataccaacttttaaaaaccaacatgcaatgagatagattagaattaaaattttatgtatgagagtcaaaccattagctccttaaggatagaaatgtcctgtttttcttcaatttgctcagtatatgatatacagtaactgcagaaattaaatttcagagggattaagtgattttcctaagtcctatcttcataaattttaatatatatcttttaaacatttaaacggtatccatgaaatttaatacaaacattattagcaaaaagccagttagttgaaaataaagaactaagattttgttttttggttactattccaattacctttctattaccctagagctgaataaatggttatttgtgtgaattaaagtgggccacttaaaaaatgtaaatgtaaaataaagctattttattcccctcttgtgtaaacagcagttttcctgtaaatcagggtgtgttttaaaaatcaccatccctttgcttaaagttgtgttattctatataaagaagattggttctggtggtgtcctgctgtggtaaattttgaaaagatgtcgaaaaacttgtcttatttgctttgaagtaagaaaccaagataaaactgaaataaaattaaatggaactagacaacatttcatctcatgctattttttcgggaaaaaaagtccaaatgtatatagtaaccttgaaagtaagtctgtagacattatcaaatcaatctaaattgagttagtgtatatgtggtaggcagaaactggtagaaattagtttatcttccccagactctttctgttttctttgtacaaagtaggataaacttgtttttagacctgattatgtttctttgttgcttttttccccctttccctaaaagggcaaggattgtccatattttgttcaattcacaccaggcgttagaacaggaaaccattaaaaagccctaggcacatgtatgacatctgtagctattattggaaagatgtgttgaatataaaacctgaaacatttccaaataaggaatataaacaatgatccccagtgttttgtagtttcactgcttataaacaacaaattgaagctgtagggctgattcttgtgatatacatacatgtgaacaacctagcccacacatattcctctttatcttattaacaggatctctacaaaatgcacttcagtcccattagacaaatggtaaggctgttgtatgactaatcttagtggacattttaaaagcttattttaaatatccattgcttcttttatttaaatgtatctttttctagttggatccattcattcctagagcttctcatttataagttcagattgtattgagaatatttgtgtcaaaatgcttgattcatatagcactttctgaaataattttgctaatcttcaaattgtctatttgaataaaaacaaagacattaattacaaaaaacttttgaaaagactattgtctcattaacttttatgctaagaattatatatcttatgtaatatatttgcatatatcaatgattttccactcatttgaacttttaaaagttgctaattggtaaaggaatcatctaattctaccttgatgggtttgaaaggagaacttaatagtagtttatggaacgacttcagaaaaactatcgtatgtcatctattgcctgttgcattcagaatgaacaacaacttatcttcatagaaaatggtactactgacttagttgctctgccctctatgtcattcttagtgaaaatgctgtgatcaggtgagctcttagtaatcatggctgtctgatgtatcaaagaggtttattaaaacttggaagcagctgtggcatagtacaatgttctcgatcattgtgcatcgcaaaatttacaaatgttgagagtgtggcttttctttagtctgtaaatggcagcacccaatgacccagattccccttctatttcacaggcgctcaaaagaaaacaaaaaacaagctgccagctttccaatttaatccttaataataacaatcttccaagactccatattttcctaggtcatttagacaaatgttattctacatcaaaatataattaaatgatccaatatcagtttaaattgcattgttggtgtattgtttccaaattataattgttaagtgttctgtagctcactgaatatttttaagtttgttgtagtgcccagaggcaaaaattgcaatgggtacaattttataaatcaaactcattaataaataatgttttcattattactggaataaagagaaccatataggatgaccttttaaaaacattactacttacaatttgaaatggctttaaatggaggattgtacataatgtattgtaatgagaccatcccttccagacctataggtatttcacatcagatttcacagtgaaggaatgtttgagagcttcccgaaagttagacaatgcatttttatcttataatgttttcttccttaaatttagaagttttgtactagtaaactttggttacttatttgtagatttcttttcattgctcatggtgaagataggaattattgcatacaatgattaaattctcccgtatgaaaattatgtttacaattaatatatagaaagtacaacttagctcaataacattttaatccaccctcaaaaaagaaaaggaaaatccaagatcatatattaagaaatatatatatgcctatgggagtttaaaattcaacttgtcttcaagaagacaagaaattttacctcttttttaggttgcaaaattatttctatacttcttatttcttcataagaaatagtttaaaagatgttgaccatagctgccttacctttataagaatttttgccattctaacaaaaaaaaaaaaaaaagaatttttgatagacattttttctgatacaatcatgaaaatatacaagacactccaaaaataacattttccttgatctctatggttaaacttttttcataaacacatacttttgctttgtattgtaccattcaaagtaggaatcaaattttaaacatgatggtaatgttcaaactgataaaactaatattcatcaaaaataaatattagtacaatatcccacaacaaaaatgaaccactgcttgtaattatttaaagctatgaaattatatattttatatgataaattacaactattttataattaacagtgaacatcatagtaattaaattcgtgcagtatcctgtgtcttatgagaactttcttttctttaaactttcagttttacctaacttcatgatgcagagtggttctgtttgtaattgctttgtaaagttctgaagtgcaggtttagattcacagtgcaggtttaaagctgtctggttaactatagtctcaactgggtaattcttatataactagattgatgcagctaagaaaataactaaagtcagtcaaaagtattggtcaccaatgcttcaaacaatcccattaatctggctggtgacttcaaggatgtctaaaacttctggataataacttgtctcttgttatgctaattaccctttccacatttagcatcacatctgaggagactgcagattgagttccatatcatttcaataaatgttatcttaaatgttaacatacttcaggttcaatgtatatagtttagggcttctcaaagtttgttccacagatttctagctctctagattggggatcatcagcccccagccatggactagtactggtccatggcctgttaggagccaggctgcacagcaggaggtaagcagtaggcaagaaagcactgcctgcgctcaggctcctgtcacatcagtggcagcattaggttctcatggaagtgtggatcctattgtgaactgtggatctaggttgtacgctccttacgagaatctaactaatgcctgatgatcagaggtggaaccatttcatcccaaaaccattaccccatttcccccacccccttccatgaaactggtccctggtgccaaaaagattggggaccactgctctagataatctgtgtttcattaagatctggaaatgctacatactatattccctccatgagttcacaatatagcaaattaaatattctgagtaaactactatttcctaaatttatttgactgcaggatcattttggaagcaccatccactaacatcccatagaagacattgtgagaaatactcactgcgtcacaactcattaatagcaacaaagttgcccctgaatccggtccaccaatcacacatcgtttgcttcattatctttgtctatatatagatataaacaaatatatatatctctctcaagatttagattgtcaggtgagtagagagggagggagggaggagtattgtcatttctaagaaatgtcaaaagccacaggtacttgaaaaggcctgaaagatcagggacttggcttcctttagagccttgaacaaattacagaactttgcttggttttgttttgcttttatcagttttattcatcagttgagagtgtcagaaaacttccctttgagttctcaagtttcatggctcaaggcgaattttctgtttcttttctgtttttaagaacttgggtctagaataaaagataagtaacaattcagtcatacccttttgcagaacactctcagtatttgcctggcagtttctcttgatgcatgcgtgcttgattttagagaaagccgtgaagttcatgcattctgtagttctgagagtgatctctgttacttgaagaagccaaaaatgcagagccttctgtacccctccaaatcttatttttaatgaaatattatatgattccaaggaaatttaaacctatgcaatgatttcttagagaataggtgagagagatgcctgagagataacagaatagggacgtctgggatatatatatatatccttggggatttttttgattatagaacacatgagcattaagaaatagcacttatttaaaagagactgttcagttgaatacctgtgttgctactaatcacttcatagctccttactttcctatttaaacaacaaaagagagttggccataggaatttttgtgttgaggtggggaagtttataaaggaatagaacacataatcatttcaatgtctcttttaatggaaagtagttatttgcatttgtcacaaattaaacttacctaattattaaaatgctgccctttggtttttgacttaataattaagaatgacttcattgtgattttaatcccagagagtcagtttatgtctgtataacatgcatggctttccaaaaaggtgatttatgtaattaagagtgagatatagtttatttatgaaaaggtgcttttgtgtggttaaatgtttaacctgagctaattaggagccttgagaattttagttagcaagttaaggcattcaaaactctgaatgggtatttataatttagctttgttccttttattagatgtgacagagcaatttagtattgtaggttcactcaatggctatcgcagcatcattcttcataatttttattaattgtatggttttccttttatgttttcaggtgagagtatttcttttctaaagatagaccaaagacccactttttttcctgagtaattctgtctcttaatgaatgctacttaatccattagggttcacataagtattctatcaagatagaaatttaaagtaaatgtgacttcattaatttaaacttgtagtattttgcttaaattcatgtaatttttttaatccatagggtaagtgtggagattgtcaaacatgttaataaaatatttgacactgtttcagtgaagagctgaggtctaatgtcctctcttcttgaatctggactggcccagtgacttaattgaaaatcatagcgtgcagcagacattgtgtgacttctgagactagttcagaaaaggctatacctgtggcttccatctgattcccttgggcatttgctctgggacaagccagatgccatgtaagaaagtccatttctctgagtccactttgctagaaaggccatgtgtaggcaatctagttggcagccatggcagatctcccagcttccagctcgcatcaatggccagccacgtaagtgagccgtcatggatgcccagacctgtggagccttggcagcagccgactctacatctgactgcagccttgtgagagaccccaagcgagggctgcccagcttagcctttcctgaatccctgacccacaaactctatgagatgtgaatatgtaaaccagaatacatattgctttataccactgagttgcctgatgatttgctatgcagcaataacgaccagaacaagtaggttcaatacattgcatagatctgttcttacatgatgtgttttaaaagataaccatgatttaaataaattactttatctcaaaaagctaatccaatgttattattaccttgtgtcttagtctgtttgtgctgctatacatagcaaaatacccgagactaggtaatttataaagaacagaaattcgtttctcacattgctagaggcaggaagtctaagataaggcaccagcagatttggtgtctggtaagggattctctctgttttcagtatggcaccctgttgctgtatccttacatgacagaaggcagaagggcaaaaagagcaaaagggacaaaaaaggcttcgccaattccctccagcccttttataaggcattaagccattcatgagggcagatcactcaagacctgatcacctcccaaaggccacacttcttaatactgttgcattggggattcagtttcaacatgaattttggagggcacacaaatcttgagggagattatagcacctcctgagaataagttttagaaattagtaatatattattctaagtatacataaataatgtgtgctgataatataaaccataaatttatatcttaaccaaaaaacatttaataagattatgctaacgtaaaaattaatgtgcttaagagtttaattctccatgaattataaaatcacaggcagataccatatagtttatatttatttaaagattctaagagattttctgtactcatactttactacccagaaatcaaccattttccagtaagttcaagttggtgagctatggtatagaattagaacttttcaggttcttgctgagagccttttatctgtgtacatttaaactagtatttttattatagaattaatatatccacatgctcaaaactcaaatcataaaaaagtaaaatgaaaactcagcctccctggctcctattttgtttcagtcccacaggcaacccctgatcacagttgctgtttttacatttttaaggtggctatgataaaacttaaaattaaattttacacgtattcccctttttcttgatttgtcaactttacagaatatctactcttgtttacctgctattgtaaatgagtaatttcttacatttaggttacctcctatctccctttctcctgctctgcttccggttatgtataattttcactttaatggttatcttcagattaattgttgcctttatagctttaaataatatacttaaacatctatttcttgatttacccaccctggccaatatttcttactccttgatatgaaaagggaaaaaataagaatactcttccttatattaacttttccttgattcatcgctatgtttttataaatccattgttacttttatctaaaaatctgttttattctactcttgatgaatatttgaattatccactttgggattattaataatgcttctatgagcatcttgcactgtctttggtgcacaaatgtacatgtgttgctaagtctgtacactgtgagttaaaggctgtgtgtataataccagttttcaaatagctatactaaattatactcacaccagcagtatgagacagtaggaattccatatcctcatcaataattggtactgtttgcctttttcattttagctattctgatgggtattttatggtataaaattaggtttaattttcgtttccttgaggattaaggaggttgagcacctcttcatatgtttgttggccatgtttattttatgaagacttatatagataggtctcttgcccataattgtattggatttcatccatctccctcctctctctcatcactgtgtagattttctttatatattctctgttacaacccttttatcaaaaacatgggttgtgggtatctgcttgtgtcttgctcttttcactctctatttggtaacctgggtgaatagttattttaagctagttcaatctatcaatcttttcctttatggatggtgcttttatattctgttaatatatctttccctattcccaaatcataagcatattctttcctatttttatgaagttgtattattatttttgtcatttattttaaaatctgtaatctacctgaaatttatttttttctgtggcataatctagagttacatttgtgttttaaaaatatatttatacatagttcactcagcaccatttattttttatggagaaaatatagatttacttattactttctagtctatgccattgtccttttttgctatgatgctaagacctatattgtactgctaaatagaaatggtgacgatcttctcaatatttgtagaacatgtttagatttttgccattaaatatgatattagttctaagttttttaatagattccctatgttaggttgaagaaggttccttctgttcctaataggctgagagtttttaatcatgaagagtgttaaattttgtcaaatattttttctacatctgtttcttttgtctgataatgtggtaaactacattagtgaatttttgaatgttaaatcaagtttgcattcctggtgaaaatcgatttaattaagataatattatcttttgtatatattgctatgtttaatttactaacagttgattaaatatttttgcctctctatttatgagtgttactggtccctgactttctttattgagtaatgtatttatatggcctaggtttcatggtaatgctagtttatataatgtgtgggaaagtgttctcttctttattatttctgaaagagtctttgtaggactagttatgtccttctcaactgtttgagatgtagtaatctcggcctggagttatctttgtttcaaggtttataaatatatattcgatttcttcatttgctatagagccctttaagttccatctttcttattggatcattactggtaattgggtcattcaagaaatatgtcaatttcatataaattgtcatatattggcataaataatagaattcctttgtttttctattattgtctgtggaatctgcagtggtgttccctttttcattcttgacattgatacagtagtccccctttatccacaggaaatacattccaagatccccagtagatgcctggaaacacggatagggctgaactctatagtatactcacacacctatgataaagcataatttataaattatgcacagtaagattaacagcactaataatagaacaattatagcaatgtgctgtgataaaagtcatggaaatgtgtgtttgctttcatgcttgtgtgcactttctctctctgtctctctctaaatatcttcttgtgctgtactcacctgttttcaaacctggaaaactgataacgcagaaagcaaaactgcagataagaggacactactgtaatttatgtcttctctctcattctgcctaggtgtttgttaatttttttcatcttttcaaaaaaaaatcagtttgatttcattgattttgtttcctgttacatgtccatgttccattttattggtttccattcttatttatactgttttattctgcttaattgttctttagttttttcaagtggaagcttagataatttattttagaggagattaaatatcttcaggccaataaatttgaagcctttgctttaatgggcaacatattactaactaagcctcttccaagaaaaatcgaaggcctaaattagaagcataatcttaagggaaattacaccaaaagttaaaatatatcttttttttttttttttttgagacacagtctcgctctatcgcccaggctggagtgcagtgacgtgatctcggctcactgcaacctctgcctactgggttcaagtgattctcctgcctcagcctcccaagttgctgggcttacaggtgcacactaccatgcctggctaattttttgtatttttagtagagacaaggtttcaccatgctgaccaggttggtctcgaactcctgacctcatgatctgcccatcttggcctcgcaaagtgctgggattacaagcgtgagctactgtgcccagccaaaatacatcaatttttttaaaataggaaaaggtactagactgttatatagtaatattcttccagatcttcaaaagatacataacctcagtagcataaaagtggttttaagaatagaaaaaaaaaaaagaggaaataactttccaagttacttggaaattcatctagtcttaaactaagtaagaatggtatgaaaggatgaacaataggctgatttcacttataaaaatcaacatcatggtagaaaaagggccaattatggttttaaaaacctaaacatcttcctgaccataccctctctttgattttaatattatttgtgcctcttctctttcatttctttatgtttatcagtcttaccattgacttttctgtttgattcttctttttttttttagttttattttttgaggaaacaatttttgccctcaaaattaatgatttcaaatgtggctgtattttctattttatttctttgttttttatattcatgtcttcttttcatttctttaggcttattttttagtgttttcaacactttatatggtttagaaacttttttaacatctttatgattgaatattttaaacatacacaaaaatagattagtataatgaacctccatgtacccatcagctagtttccataatgagcaacacattgccatcttgtttattttcccatttcataattttactttaatactgcaaagcagcttcccaacatcacgacatttatatataaatacttcagtgtacatccctaacagaaactcttaaacaaaatcactgtgtcatcattccatctgacaaaagtagtgaataattctttaaatatcacctaatacttcgtccatattaaaacttattcaaatatctcaaaaaaaatctaaggatcagtttgtgtgcaatagaatctaaaatgcacctacacgttgcttctgtctattatgactctttgcattcttattgtataattgtttttctgttttttatcttaatttcttagaagttagtgaaaaaacagatttttatatatagaaaacaatcctggaattagcagattgctgccttatggtatcatctaaattgtttcttcattccctgaattttctgtagttagatctagaggcttgattggattcaggataattctttcagcaagaatatttcataggtggtgctttcagcttactacttatttgaatccctttgtaaggaacatgtcttattgctgcacagggttcagatgatagccacccaatccttcctttatataattcaccatcactctttcatttgatgtttttatcacctattgcaatcgttctcttttaaaataaacatttaatttttaaaatgttgttatgtaatttcttatacatttctacatatttctaaatttttattgtgactttctctgttatgtatgttgtttaggtaacatacttcctataaagtttcctaatgtgcagtggtgaggtttttgctcgtttttaggtttctttttgttattgatcttaattgcactgtggtcagagaacaagatgtaagatgtgtatttatgggctctttagtgtctattcaggttgttttatgtcatagtatatggtcatattttttctctatatgttcctttccttataagaataaataataaactttttctctatatattcctttcctaatatgtttcatgtatgcctttgctttaaaacattattagatgccactttctatgttcatttgaagattataccgaagtttctagctgttctgcttaaatacctgatatcctttagtctgtagtagctggcagttattgagagtacatcaaagtctccattatgatgctggatttgtcaatctccttataattgtatccctcttttatattaggaggctacgttgttaggtgcgtaggttggaatttattatatctttctctggattgttcttttttctttatgtaattaatgaccttttaattccctagtaatattttattgacagccttttgtctgatattaacatagtagtacaagtttttttaagttagtacctactaatgtatcttgctgcctttcaatgttgtcatatttagatatgactcttagctaaaggtaagagacattcagtgatcactggttttattttttttagtttgagaatctccgtgtttcattatttcattttaaaacatggaaaatctttagaacttttttcttaaaaagaatagacccttgttcaaacaaaatacttttaattaaaaattgagtttatttttatgtaaaaattgttgccattataaagcattctttcatattaaattataaattatccatgatatgattttttcctttaaacaagaaatgtatacattatcattcattgcttttccttgacatttatgtattttaaacaataaccattggggttttcaccttctttgtactttttatcttaaagttagcattatttaaattaatttaggtattttccatcaaattattggccctaaaacctttagtgctatttttatattcagtatatatttacattttaattatatttgaaggtatttaatttttgtattcatttgaggaatgaaatataacaatatatttttcattattttatcatatttatgaatgactgggttgcactggtgcaaattattatcattctgatacattatataaggctgtatcttccaaagtaagctttaaaatgtgctcagaattgttcattgcagaaaggaaccttgggagagtgctgggaaacaataaaaggtcaagtttaatgccttcaagaacttgtggtgatgctgttgctagcaagaacatactgctttattagttgcatagctttattagtaggtgcagtttactaccactcagtatagtttccagcctttcaagtgaaggagagctggcttaattaattatggcatttctaatctcacttaatttgttattttagtgaagccttcaacaagccctactggtttttcccccaggtgacagtaaatattacagaaataatacactttacaaaatgggtattgaagtgcacctctttggaaagccatatagtgcagacatatttatatgacaggagcattctaaatgggatctcatgtggcctctttattttccatgaagatgcacatagaatatgaaagggagtaaacatgtggcttatgtgggagcaattacaaaggtctctttgtatttcctaagtccaaaggcatccattcacacctagttctgcatggtttcagttgcttctctgtcaatttttttcccagtgcatatgatttgaaaactgtagttactgtgacagtattttggttattagatatttttgttatggttttaaagtaattaatcccttgctactttatacgtttcatgacagtggtggaggaaatggggggaaacctttggaggcactcctgaaagaatggagagagaaattaatctccagtcaacatagggtctaatgcagttataagagaagcaaagatttagggccagccccctgctccaccacctctgtcaattcaccactggatgatgaagcccacaggggtgggtgtgactcatctgcatatccagcccctaataaatcaaattgtgcaattcagggaatatggcaattgaaaaccagatgcttagaccactaagccatcccttctggcacatcgtaaagcatggtgttgtaaatacagcagataattgaaatttagatttcagatataggcactgttagcagccctcctctagctttcattgctgagagtcttccaagtgtgtttaacagttcatattaaggcaattgctgtcaaaattaattaagcatttttattttttcatattttttaatctcttctttgatgaggagagtattcataatacaaacaaaagacaggcgtctgaacttaaaagtacatccaaactgaatatggaaaatattctatagtttgggaaataaagttgtgaactccccatttggtttctttcaagtttttgctttaaacaaaacacaggttttttaagaaaaaaccttgctactccattgattaaaactgtcatccttctttgtccatcatataatgtactttccataaattagctgcttcacttctttttataccaatcaaattacagtggtccttaggcttaagtgggtcacaggacttggcttcttataaccctcaaagccccttagctttttataaaagccatcaagcatgccatttgatctgtacattttctctttttttttcttgctgtcttcaatattatggacaaaatttggaatattttagtaggttgtctacattttataaaacctgtttttgtaatgagactgttacaaatgagagtaatgaatgcaataaagttaagaatttgttgaaatgatattaccttattcaaaagtagatagagtaaaagtaaaaagtctatgaagagtggtggtttgaattgggcaatcaacctgggatgaatgtcaccatttcatccgtgttagtattaggcatttcaaatggcaaaattatatcaccaataatattctttcaaaaaggaaaaacagctctaccaggcttgaagtgaccctgaccatcatagctattcagacagaatgggtgttttatcattccatgtgaatatcgtgtgttgatcggaagtcataccaaaaaaaatacttaaagtgcatcttctaatgtgacagtgtaatcataaggacatcagagttaagccaattattctagttcacagcagttttaaattgaaagctatttttgtgcaatggcatctagatgaatgtgattctcagagacaggtaaatagtgtcaggctctaaagattttgcaactgtgatccaaatgatgactgagttcccgcagtgaggccataactcatgggcactcaccagtctttccagtactgagaagtcatcattagcaccctaatggaaactgaggatcatgatagaaacgtactcagtgatgcatttgacagctgtacagagtaacttcctttagagggaaggattaaaatttgacagagtttgagcataaataaggaaataaattaagataagactagatctagatgcatgagcacattgaggattgaattattcaatccaagtggacagaaagaaaataaatagattgttatatttcttttttaaaataatagggtaaaatgtgataagctgggcttggggggatgactgagttgctttgaaaaataatgggaaagaaaacccaagcagttttgctctgttttaaaccatttggaccatagccacagaattcagaggaagagaaaactatgttaagtaaaaatcaaccctcaactttcactatgttcgggcaaaactctgggaacagtgagacaaattcatgtcacattaatgaagagagttactgacttacactgtcccctttctattcctttgtatgtctttctgcctcctggtctcaacctctttgtgtcaataatagagatttatgggaatgactgccaatcataatgcaaagtatatagaatggtgcaacacttatgactgtcttttttttttttgaggtggaatcttgctttgtcgtcaggctggagtgtagtggcctgatctcagctcactgcaacctctgcctcctgggttcaagtgattctcctgcctcagcctcccgagtagctgggatgggactacaggtgcccgccaccacacccagctaatttgtttttgtatttttagtagagacggggtttcaccctgttggccaggatggtgtcagtctcttggcctcgtgatccacctgccttggcctcccaacgtgctgggattacaagcatgaaccaccatgcccggcctgcagtgaggccataactcatgggcactctcttttttttttctttcttttttttttttctttttttctttttttgtttgtttgtttggagatgaagtctcgctcttgtcccctaggctggagtgcgatggcatgatcttggctcactgcgacctccgcctccagagttcaagcgattctcctgcctcagcctcctgagtagctgggattacaggcacctgccatcatgccaggctaatttttgtatttttagtacagacagggtttcaccatgttggccaggctggtcttgaactcctgacctcaggtgatccacccaccttggcctccccgactctctttttctgcaagcgcttaatccttgggcttactcataaaatatgtgccaccttgatagggacatacctgaccatctgactgaggagggcaaagtaggaggtcagcaaacaaatttcatgccctggctcctttcactgtccatggcacttcagcctagtgctgtacaccaactaccaaacaaccagtcatttctctgtttttcctttctggtgagatggcaaatctgagtccaaaatctcattgattctccatttcctgaagtcaagggtaggactgagtcaattattttgttcaacttttttgtatccagtggatgtcctaaccattactgtttctgtatgcatgtacttcagtctttaagaaagaatgaaaaccaggtttttttctttattgtcatatctgtaatttgctcctttctcagaggaaggtcatccacagaaaattaaccaatatgtttgattctatagaactatcatttttgcgtccagttgccattccttctgaagagctgttaaatgcagtgattttaatctgctttgattgcctcacaagtgaagaggtgatttgctgtattttgtagaggtgcatcaacggagtaccctcagctacagaattatttcccttgtaacaagaagagaagagcaaggtttacatcaccactgtgcttaaaaactcttatctgtcaggaagcatgtgcttttctgtgcaaccctgggagttcattaaaagtgtgaggttgcctcactaattagatatggcggagtgattgggcatagtgctgtgggagaaaccttaatgtaactggagtgaaatgaaaatctctgttttgttcataccaagggaaggtttgattaaaaagatttcctctttttcatttgggacactgttttgttgtgtcatgtggcattgagtaagtgatctgttacaggtttgaaacataactgcttcatgtatgtttttaaccattccttgttattattctcataacatattaaaagtacagttcaggaaagatccaaatatttacaacagtttctctggggtttgttatttctgcatgcacttgtgaaaaggagtgctggcccacattcctctgctagggagtatggtgctgcagtcagcttcacaatcagatggcaggttgggtaagttggtttactcactcagtcagttaatatgagtatccactataaactaagccaataaaactcaggcagacaaccggaggtgtttttacatggctttctttcttccaactttgtaagctagaagccaggtcagtcttcatgaggatttactgagtgtagacactgtgctcttggagcctcttgggagtggaagtggagagagacgggcagtgatgcacatgctatgggaaaagattggcccattagtgtggggaagttctttatgaagctggtttgtagctcttaggcaaaagcaatcagaatgtgtaaacagtcggccaatttcatcctctaccagttttcattgcataggattttggccccaaacaattgctcaactaactacccatttggtgagtctgaatgggattcaaggattaatccagagatgatatttggattaaatcatcactgtctaatagaagcagttataaatatgtaaattaagcaatctgattatagtacaccttggctgcttctagttattctagtaattgtctatgcagggttagcggaagagatttaagcattagaggctgaagtttttcaaccccaaagtagccaacaaatggaatagaagttaagaacataagacctttagtacttatggattcaacatttgaaatcatatacacatactacatgtaagccaaaggcccagagcttgtaataattcataattttgccgtggcacaaactgcatcatttacactgggaggtttgtatgtggagtgatgtattttcaaagaggctccagaaaagatcgcagcattggcgacctctcacttttctgcaccttctcggggaaatagatgaggagggtggccattagaatatcctccccacattcactcaggcttgttgttgttgtttctagcaaccaccacctctcctatttagatatggtcccacagagctatcactatttaaggatgtgtctgcgaaaacatttatcatcatctcagtgctacaagtctcttacaattctgtcaaagatatgggcttggattagcagctacatatcagttcttatcttacacttggaatgggggtgaggttagagaaagaatagcagtgtgtttgggatcttgctggtgctcagttgagttgaattatagaacatgcaaaggggaacagtagacgggccattcattagtatcttctctccagcttctgtgctccttactccccagaatggactcttcagagcaaaaagtgtatacattttttcatctctgtatctccagtgcttagcactggagcaaaggggaccctcaataaggacttgtgaactgaatgattcctgttttgctatgggtttgctagccctgttatttctcatttgatgatatagttttgttgaataatgagcgttacccaaaaacctttcccttgaattcccgtgttcaattttgcttttgattacagagttcctaaagcagaaggctactagagggagaaggtactgagtgaggtcaaggtgtaagatgcctgtggacatggatgtcacccagggtgatactaaaagataaggcatgagagagggagaaaatattaattaaaatgatggagcaagaggaagtgctgaaggaccaacttggagactctcaggtgtggacaatgaaaagggaatagtaaagcagcatggggcagcttccagaggaggaaacaggaaattcttatctagaaacagctccaggatgagagtgggcagcatgaagaaaatgatcatgtctcacttcatagggttgccgaggaagtggtttctttggggaaagtttattgtcatttacatcaaggtagcagagacaatacttaaggaagttcttgagcttatgaaagagtttcagggcatcctaggaacagaggaggagaagggtttggaggtacttgggaggtgatgcaccaatgaaggctaaggaaatgccgaaagaagaaagagcaatggaagaggacagttgccccaagagttgtttctaccttgacccacgattaagtctaaagaaaagagatagctggaagaggagaggaatatcgagcaagaggttcaaaacagattttctgagatggtgggccttgcttgcagtcttgcctcaagtgtaaggtccccatactgatcaacaatctctagtctgtaggttcaggatctggaggtttcagcatggaagtttcctttctcagctggtgagaatgtgattaactcaagcttccagcgattgtggaacttagttgattttaaatattggtttaaatgtattttataaataatgaaagtcattttaaattacattataataaataaaatataggtgcatatgtaaagaaacataaccagccaggtacaaatcagtgcattctcttttacttcaattatttcaatccataaataaagattagctttcaattgcactttaaattctcttgccagagatgcctctggcaatggttccagctggctggcaacttcgaatgcagagacagtatcatattgtcatattcatctttgaatccccccagagtccagcacaatactctgcacatggagtctagcataatactccagacgtcataaatatatattctattgaaagttaactaagaccctttaaggaaaaggaacagatttgtttacccagtaaaccccttgcaagtagagtatctgttgtatttcagtcctgtgctaagtgacagggataccaagatggatgagactcattccccacctcaaagctctcagaaccaagcaaggcagacagacctgtaaagaaatcttcacctaccccgagatcaatgaatgccatgacagagcttgcacatggcatgaaagtggcactgaagagggagattgagtccatgcagagtgttcagggaaaaagtggctcatactgagttgggtgtgaaggtatagatggctggatatttgccaggcaagcaatggtattctagaaaactggtgtatctaggtatgtgttgagcatctcccctttgccaggcactgttctaagctttgggaatatatttgtgaacacaacagataaaaaccactgcctgcctacttggagcttacattttagctattgataaccaatagattattttaatgggacagtgcatccctctacctctcaagcactgtaaagttttaagtttaaaacatttgtatttaaatagaaatgcatggtggtttccttgtgtgatcagaatatattctggtctggctatagctacttttgcagagtctctcctaactctttgttgtgtttctacccttgctcaaaaaacaaacaaaccttttgctgactgctgcccatgactacagctgctctcagcagttcagacctctgcacctcatttcaagctgtgtttccacatgctataagaacccacgatggtgtagccggctctggatcaccctacttctctccatacagttgtctttgactcttccgctgttcctccttcttcacataagtcatggtaaggattgcttcaagtgcctcttaggttgtctgaagaaaacccttccccaaattgtttattttcagtaggtcttataagctgtgaaattgttttttgaaactagaggcttccaataaagatgtcacaaagtgaaatgcaagaatgacaaagtgaatggcgaaatgattgtgtaggaagatatatgaaggtcataggagagcaacagatgcacatggcaaagtcaggaaggtttgagtctgggtgagaagagggtgaaatgcttatagacgataggcaataaaaaagaccttttcaagaagtccttgaacttgccttattcatgaactaagatggcttgtcaatgcggttctctatctaatagttataaaaaaattctttaacacagttttggcttcctaaattttgagattttttttttctaaatgtactaccaaactaagcacacatacgaataagtgtgcttttcttttctttcttaccctgttcatgacacagctatggaattggtctgtggattaaaaattttctgcagcacattttcatcctgaagattttcgtcatgaagaccagcagggaagtatgcttgtgttggcatgcgtgaaatgcctgtgcaaaaataaacaattgctttaatagtgtgaccttttatctctactctctctgatccaaacctggcttttgtatagctttgcatcagtgtatatgggatatttactagagccaaatttgattgagatgtatttcagccagcaaaatgaaagtggttaaggtagaaatgcttggtaattgctgaattatcccaacttccttaagttttttctatttaccagctttaggtgatgatttggagttacaaatgaagccctagtaccatataaatgtccattttgacagacctggattctaaatatttgagaagatggtatagtttaaatagattaaatgaaagaaggatgtttataatacctttgatcatacattttatgatttagcatgatctgaagcagaccttgtggaaattgctgtttttcaatatcttcaccctttcaataataaacaacattatctttgtgtatcgaagcactgggcttaagcagttttaatatatttaatgatataggaaaactaggggaaaattagctataactgaatgtgggaaagaatccaattataaatagaaattatgattataaacatgtttatatcagtcttgtatttgaaaaaattgttttccactcttttcagcacttttgaaatgtgttatttgaatatgagaaagaaacagtgaacaataaaggaggggttgcagaattactttgttgaacttctaaacttctatggctctgaagattttaaagcagcctttacttgaacatatttgtgtagggagaagtgcacccactggtgttagccttatgttgaaagattagcagagcagatgaaatgttgatcttgccatcagtagttattttcatttctgatacctcgatgagatggatgaatgtgtttggtccactcaaatctcacaaatgaaacagaattccctctctacccaccatcacctctgccttttttaaaagctcacagctgtcttttgacacctggtatcagcttaagtcaacttttacacatttctaccaaaaataagcgataaaaccaaacacaaacaaaaaaactccagcaggtaaagggtataattttaaagaactttattataaaaatttcactggtcttttaaaatctcaatcagaatactgagaaatcttaacaatgaactctaactgtgctgattattagcaatgagaagaaaagaaaatatccaagaaaagatcataggaaaataaaaaagaaataggggtatagagagaaggttttggttttatttcaggtatgcttcatgccatagatttattcctcaaaagttgtatagaaattagtatgttaagaaagtataaaagtgttatctattctgagagtgcttctcaagggaagctctccaagaaaacatttggtcaaatgaatacctcttaattgatctgttggggaatttttatatgtatgtttattcagttggagtttgcctgccttagtatttggtgcattatgacattttatgcttggaatggaccttaaaaatcttcttatccccaatataaagaaaatagaagtgagggccaggaggtgatgtgtctggtcaccagacaaagcaatgatgaacttatattagaatctgtgtctcttttgtgttagaccagaattcagttactgtatcttgatcttcactcattttaaatttatttttattaaacctatgaaaatcattcagcatctcttgcagacacaccagatgaagagaaggtgtggccaaccctgattatattgattatcaatgggatttagcctctgtagcacataatccacaactgcataatctctgtgaaaacagtccattgaaagttgtagacttttagtgcattttacaaagttcagaactgtttacactgagtgcagttttatcccatatgcattcaggtaatttatccacatggcttagtgtgtgtttgtgaatgtgcatgagcaccctgtgtgcatgctctccataagccaaggatttgagccagtcatttaatgttaatgattttacctgctcccaggattagcaagggactagttagtagaatatttatgatctaatcgtattccaaaaaaggttttttttattttaaagatgcaattattagagcataatctctagaataatgaaaaacttgatagtctttcgtataaataatttctctgtttgtttcataatatggtatcttttccttaccctgtttgcctgaaatcaacaaccaagagacattacaaggtaaatacagttaatgtgcttgctttcaaaactaagtcttaggaaacgggggtcccaagaaattttggttctttctttgaccttcagtttcttcttcgacaagatagtcatctttttgtcttgcatatgttcaggtatgaaattggaataggagtgccaagaaatccactagattgttgtggatatacatctagttatatgtgaaatagtttgagatctttgaaagaaaggtaaagtataatgaagacattattataggtttttgttgctgtcattaaaaaagaatccataacataagtaataaggtcaacattccttaagtcagcaagtatttattgtggtgcacagaaagaacactgaactgagtatcaagaatcctagattctggctttgtcactaacacaacatgtaaaaggagaccagtcatttcagctttctgcgtctgagtttccttagctataaaatgggtgaactggcttcactcatcaacaccatccttcccggcttagttaataatttttaggatttttcctgagtctcagatctgtactagctactttaaggcagtggtttttgaagtgtggctcctggacaagcagcatcagaaacttgtagaagctcgggactcaccctagacctactgcagtagaacttcaagcattgagtgcggggcccagcaatctaggttgtcacaacactccaggtaattcttctgatccacgttaaagtttgagaaccactgttaggcatagaaatgaataaaacacagttcttcttaagcagcttttaatttagcacttttatatctctaattgtcatgccaatttctggctatgtaggtgtaaaatctagtggcgtgtgtgtgtgtgtgtgtgtgtgtgtgtagtaaattataggcatattaattgctaagactgaaacatttagggatggtatctttgaagtcaactgagagatttccaatggcaaggcatttccaaaggcataaaaaatatatatgaagtttgaaaataacagtgtttaacaatcaaattgcatgttaatttcatgtgtgcttatcaaatacagtttgttttactttagcacagatatttttgttctgaaaagtaaaaacaaatattctggaattatgcccagaattttaattttaaaatttacattatgattatgtatgagcaccaggcacataacctgatgttcagatcctctctgtataatgtttctattactctcattctaacattcatgtgtattttcaaaagaaacttgcagttgacttttcagaatgcaaatcttgtttttaaatgcacctgagtttttaaaacataattcagctgcagttaaattttatgggcaagtggtttccaatgtagctaaaattcattgagggggaaaaatcatggccatatatgatcacctgtaaatcagagggagatacttattgatagacaggaccgctatttcagttctcatctgagagatgaaaaaccgagcaataaaactacttttaatttcattttgtagcgacactagaccagggaaattccatgagaacttgggaatgcgatgagcattctcttccaaaaaaaagtatcaatagtgttaagtttctttggacatgtataacctagtgatgcttcataatgaatacacgttcttgtatgaaatcagtgactggtactaactgtgaaatatgaaatgatagcctggtactgataccttaatcacccctggagagaccgttgcccctcttggtgcctggcccctttcatccagcctgtgagcacttgcagttgttagcgctagtgctaaccaaatgtaaacacctttactttccagctgttgctaattggtttgggactaattatagaagtgttgattttaaagctaaaaatagtgcggtgatgtttaaatccaactcattttggctgtcagaaatgctcccttgatcctgaaagtgttgctaaaaacgttcgctttaaaaaaaattgtagtaattaaacttgtctgttgtgagagctacatatgatctgtctgttccctgctctgatgaaagtggtaaagggcaaacatcttaaaggtgtctgaccagttggcaggacacaatctcctgctgaactttattttagacagcaaagccttgtcatttgaccaaaagaggagataaaattttgaaatagctctataccttgtatttcatacagctcattatatccttctatgttaacattaaaaatagaagctgtaagaattatattaataaaattaattatagagcgtccaaaaccattatgttttctagaggcaagtttgaggatttgaaatcacataattaatattgttcaaacataaagctgaagaaatatggtagctgtttggcatcagttgtttatacctctgattcttcataatcagggttatttttctacctttccttccaaatttaaaagtcatcttacagatttttctcaaagtcatttaaataagcaatgaggaaaactatattttcatttttagacatgtgcaatttcatgactcttcattttaccatgtaatttagtgaaggaaaagcttaagtattcttaacttatcatttgtcagttattttgtaatttttggaaaaaatgattttatgtaccctgttaagaggtaaactgccttgtcgataagtatcaaagcactgcacagctacagtgttgctgaagtcaatttgaaattggctttatgtccttataggatgccctaagcatctgtctgcctgccccatcttcagagaatatcaaagaattttgttagtgcaatatatggaaatgatcttggcaagtgataaacactgctcattagttgagatgataaactatagttactacccttttttgatagcttcggcaagggaaagtgtttttgatattatcttaataataataggagatataagtctgtgaatgtgtattctttttaaagtctgtagtcattgacatgatttctccaaatgtgtagtcagttcagaattacccttgagcagattatgacattgtatttggcccaatattactttcaaattgtaattgatatttccatatactcagagaattaagtaacttgttgatatgaatagaatctttacttgctatctaactggaactagatgaaaaattcattttttaatcttgcgtaatgttgatttgagccagaaagtatgttatttttctaccttgttagggatcaacaacaaagttccatttagagtatggtgcagaggcaacaataatgatataaaactttatagcaaatatcagtttttttctttgacactctgaggatacatcccatacagaattataaaactaaaaagaatatttattttaattaactgtcactgttaactgttcatggattgagagactttatgatggttagattgtgatactctccaaattgatctatgtattcaatgcaatccctagcaaaaacccaactgttttttttttgcagatattaacaaactgattccaaaattaatatggaaatgcaagagacccagcatagccaaagcaatcttgaaaaataagaacgaatttggaagaatcacacatcctgatttcaaaatttagtacaaagctacaataattgactgtgtcgtactgacataagaatagacaggtatagatcaatgaataaaatacaattgaggatccggaaatatacccttacatttttggaaaattcattttctttaagggtgtcgagacaattcaatgaataaaaaaacaatcttttcaatgaatgatactagcacaactagatatccacatgcaaagaatgaatttgaactccttcctcacacagtgtgcaggaatgaactcaaaatgataataggcctaaatgtaagagctaacaccgtataagattcttataataaaacaaaggtgtacatctttgtgaccttatattaggcaatgtttcttagatacaaaaccaaaaacacaagctacaaaagaaaaaataaatacattggacttcgttaacataaaaaacttttgtgctttaaaggacacatgaagaaagtgaagacaacccaaagaacaggaaaacatatttgtaaatcatatattggataagaaatttgtatatggaatatttaaagaactctctacaggtcaataataaaaagacaaatagacatttctccaaagaagatacacaaagggccaataatcacagggaaagaagctcaacatcattggtcattacagaaatgtaaatcaaaactacaatgacatatcactttatacccattaggatgaatacaataaattaaaattaaaaatgaaaataagctgtggcaagtctatggagattttatacccattaggatgaataaaataaattaaaattaaaaatgaaaataagttgtggcaagtctatggagatattaaaaccctcatgtattgctggtaagaatggcaaattattcagacatgtgggaaatagtgcagcagttcctcaaaatgttaaacatatagttaccatatgagcaacaattccactccacagcgtacgccagagaacagaaagcatatgttcacacaagaacttgtacccaaatgttcatggcaacattattcataataggcaagagtggaaacaacccaaatgctcaccagctgatgaatggataaacttagtgtggtatatccataaagtggaatattgttgggccataaaatggagtaaaatactgatatatgctacaacatggatgagcttttgaaaacattattctaagtgaaagaagccacaagtcttatgattctgtttatatgaaatgtctacaataggcaactcctttgagacagaaattagattaatgattgacagggcctgttggggaaggggaggatgaggaatgactgctaatggagtttgaggtttctttttggggtgataaaaatgttctgacattagttgatgatggttacaaaactctgaatatactgaaaaccacttaattgtactctttaaaatggtgactcttatgtaaattacatatcgataaagctgttgtaagaaataaaaatgatcttaaggcaatcctttagatgactgtagctgcagccccgcagacatggggctgcaaacttacaagcgatccaaccctagaaccgcctagctaagctacttctaaatctctggctcagagaaactgtgagagagaataaatgtttatttttttaatttattaagttgtgggataatttattatacaacattagaaaattaatacaatgagctcttggtgttatgtgcttgatatatagagaagcagacacaaattcattcctgtgtaagagaaacagataagaaagttaatgattttggcaaaaatgaggccatcaaatatcctgacatacatgataatcacaggttccaatattatgttaaattatccacctaagtatttttgtaacccgcccaaccctgtctccacttatctgtaagcatatatcaagcccttcataataatatgaatgtttgagagctttcaaaaacaatcgtcttttaaaatttggtaccttaaaccatgaagtgttctttagccttatggaaattctttcttatctacatgaaaaggagaaaattaattttttaaaagtctagagtagaccaagtgtttcacaaaactaccaacccctgcatgaaatgttgctactcaatctaaaagtgagagacattttttttaactcatttcactacaacaaagtgcttctgttgcagttatgtcttactttctttaaaataataacttggctgggcgcggtggctcaagcctgtaatcccagcacttgggaggccaagacgaccagatcatgaggtcaggagattgagaccatcctggctaacacggtgaagccccatctctactaaaaatacaaaagcaaaattagccgggtgtggtggtgggcacctgtaatcccagccactcgggaggctgagccaggagaatggcatgaatcagggaggcggaggttgcagtgagccgagatcatgccactgcactccagcctgggcgacagagctcaaaaaaaataaaaataaaaatatatatttttttatttttttatttttatatttatattttatatttatgtaaaataaacatattttatatttatgtaaaataaacatattttatatttatgtaaagtaaacattttatatttatgtaaacattttatatttatgtaaaataaacatattttatatttatgtaaaaaacattttatatttatgtaaaataaacatattttatatttatgtaaaataaacatattttatatttatgtaaaataaacatatttttatttatgtaaaataaatatattttttatttatgtaaaataaatatttatataaattatataaataaaatatttatagatatatttatctgtctcaaaaataaaaattaaaaaaagataacctaatttacttatgtccagcctcttaagctcgtatgttgtctttcttactctgttggaataatgcattcagatgcataaatgctgtttataagtgtgggtttttgataatgggtctttctatatctggtttgttgctttgatgaaaccggagtccacgtgtaacaatagtttattgtgactccacttatgaagagacaggtatccacaggattccctgttagggaacagctctgagccctaatgtcttctgtaaggaagcagcagcatcaggcgtgctttctagaatccatcctctcctctgcttctctgggtaacatccaatacaacttttccactgtcctggagtacagggcctctctgaccctctaacctttctgtagtgggagcctgtttacaattttagaaattaaataggcaatttgaatctctctctgaagattatcctcagagtcaaatttcatgacaaagtaagagttctggatttcttcttcctgcagtgtttctgcctgactttgacagaggtgactttgccaggcaatgttttttcatggattttgcttttctttatattttaatgttgtgaggggcaagcaagtacgtaccttaaggctaatatatcaccatctgtcaccagagtcccccctttggtattcttttcctttctggtttaaaacactcaatcccaaaagcctatggctgagtagcaagaagctaaatgtattccaaagctcttaacatattgcattgtgtagatgacccatttgagcatttcagaaaccaaacaggagagaaaagaacattgaaagcacagaaaagattaacacctgcttccagttttcaaagaaattagagcatactgtatatatccagcgtaaagcggtttactctcccatattgggatattttattcagattttcaattcaatatgcacagcatcacatgcttatgactttgtttcactataggattccacgcagaacttggaagacagagaagttttgaatggtgtacagacagaactactaacttcgccaagaactaaggacacattgaggtattctctttatacagataagaatatctgatttatttcaatttgatgtgttttttaatagtttataattgttcttactttacaagaaagatcaggataagtagaatcatggagtgcaacatgtcccaagtctaacagttacttaattcttcttttctagtgttttcttcatatgagaacttactgacaaacatatatacaaatgatccttaatccatccaatactcttctgtacccaggatttctgaaatacttttttctctcctcaaacagcaatttcaaatgaacatttcagaggtcattgtggtggttttactttgactttagctctttgaaagcaccaaatcctagccactagaccaccggggaaccctaaatttagctctttgagtgctactttgtattgtgctttaacacccttgtaatagtttacttgatgaaataaaatgaaccctgtctatcaaccagggtttttcatgttcttaatgaaggcaactcatttgctgtcagtggctgccatgtttcccagtactttctttgctttgcattgattcccagttcagctctaggtagtgcctgggttcatatcgcagctatgcctctttactagtcctgtgagcttagacaagttactcatttctctttctcttagtttctagtctgtagaatggaaatagtattaaaatcttattcagagggttagtatgggtattaaatgagttaatacatgtagaccattttgcacagtgttgtggttaggataaatcctgtgagtgtttgctgctgtttctactactatcattaatatcacatcatctctattattgttctaatcatcattttgtttaacgcacttcaaatttggcataaggaaaataatttcatatttaatagatggttacttcagcattaggtaaagctactgaagtttataattattcatgcagttgacgtattcctttcatttagtccaaacaattaacatgaaattagctttttaaaaacataggtcatcatcctttgtcatgtgctttactgtatggattctcctcaaacttatttatagccacgtgagcatagttactctttatttagatcgtttctttgactgatgagctatacagtattaaaaatttgatggaaactaggctaggtggtgcctgcctatcatcccagctacttgagaggctgatacagaggatcacttgagtgcaggagttcgagtccatcttgcaacatagggagaccctctctctctctgaagaaaaaaaaaaggcggggggatatggggtagggagtaatagaaaatcttcaagcaccatcttttcagaaacttaataagattatctaattatgtctacctccagaaactaataagattgtttctggaggtagacataatgattgtaatgctcttattctatttggctttaatttcacttatttcagtgttagctttttgaaaagtttgttaatatcttgtccaaatgctatgtgaatagcatcatagagtcaacattagtttggtttatggctgtatgaacaaattagccaagctttcttcagctacagggaattgagagaaatggagtataggaacttaaaaatatatatattcttttatttatttatttattttatttttattttgagatggagttttgctcttgttacccaggctggagtgcaatggcgtgatctcggctcaccgcaacctccgccccccaggttcaagtgattctcctgcctcagcctcccaagtagctgggattacaggcatgtgccaccccaaacccagctaattttgtatttatagcagagacagggtttctccatgttggtcaggctggtctcgaactcctaacctcaggtgatccatctgcctcagcctcccaaagtgctgggattacaggcatgagctaccacgcccggccaaaaacatatatattctttagttaagaaatgtatgtgtgtgtgtgtgtgtgtgtgtgtgtgtgtgtgtgtgtgtgtgtgtgtatatttgattatcaaaacgggcttttcacatgagttttcttatcacctttaataggttaaggaactacaattcatagcaattaagtgacagctagagacttaattgacacccaccactcttgtctacaaagccactatttcaaacattcctgttgcgtgtacattccctgatgccttggtgttttatttcatgctacctgaccaaggctaggaaacttctcatataaaagtgcagctaaaatcagttttatatcaaattcaaaaagtagagtgagtgcaattcccagcactttaagaccctggagtgggaaaaggatgataacaatcttaatgccattgaatgcatgggggaaagcttggaggttacagttctaagacagggcattgattctagccagtatgagatgaaaaacagttgaagtgaaattaggaagccaattctgtctgaattacatggtccatatgctcctggggcagggagaatctcatatgccacagggcttggcccatgcataggactttgggcacgcatccacgtagaagctaagtaaattatttgtagtctatctcaaaatgtcttgtaactgtttaatttctataatcattgctcaagcctttgttatccctcagctacaccattataataacctactaacttctctgtcaaatgtcagtttccccttattctaattgatcccacatattactgttggataaaatgttttaaaccacagaatttatcaagccattccttagttccagaccttttggatttagataagtcttgggtttgagtactaactctgctacttactacctgtgcaatcttggactaattacattacttctttaatatgtatcttcataggaaaattggtatcatggtcacatagattattgtgaagattaaatgagatatagtacagacaaccgacttagcacaatgctaaatgaaaggctgaagaaacattaattgctattgccattatcattgtcatttttacacagattgtagtttattgtaactatttctcattcacccaagcaagactgtgaatcctccaaagggtttctgacacctaatacaggtcttggaatataatagggacatatttgctaagtgaatgactgaatggataaaacacattgctccataaatcataagcaaaactgttaactgctcacccattattaacgcaaacatctttatttaaaataacatttaaaagacattctccaaatagttttacaatatgcatctcttatgaagcaccactcaacttattttgatcttaaaaagacaatgaagcaagaggtttggtggttttttaagaaaattacactttgaatgtctctttaaatagcaagcaatatgtacaaaagaccttcacctcatccctaattcctatctcatttctgactctgccttatctctccactcctgcttccacagataagccttcttccagacttgccttttgtttcattcttaaaacgccagcgcattttagcctatcctctcctgtgtcaaggatatctattcattgatcaaactgtttgcagaggccatctcaaaatatgtgggacatttccccatgttttgatgctttattcctgtaatcattgctcaagcctctgttactctattagtttcagctagattattgcaataatttagtaattcctgcctcaagtaccagtctctcccttgtggttcccttttccaattggtgtcacatatcactgcataaatatttctaaaccatagcgtttatcacacttctccctaattctagaacctgtagtgacttcattttctgcaaattaagtataaatttgctagccagaaatttaacacaccactctgagctttgatctcaagctaatggtttaatctgtctcctgtacacagcacctttctttgtttcccttttctcccttcttctttctcctcgttattctctctcccaccttcctccctccctccctctctctaatattacaaccaattgttatgctcacagactatcctcgttcaatatctccatacagttgactttctctcctgtgcatgcccactccatcccctcacctatcttttctgatggaagacccgtttgtccttcttcaggaatagattcctaatcccagcttcccttcctaatcctgtaccctcctctgaaacacatcacaaggtgcctccactttgaaactgcaccttggttaggcagttaagaactctgctctggggtgcaataaatcactatttgagtcttgactctatagaaatggtatgatgtcggacaagttattaaactctctaagcataagtttacttctaaaatggatgtgatataaatgtttactttatagatttagtatcagtacatgatataatgtccagaagaaggttagtacactgcctcccaagtaataccttgcattcaccgagaatctactactgtaacccatcgctttctgttcttttttattacctgtcacaaccttccccttagattataaactcctcaagcattggtctttgttttttccttgtggaacttccccaatgaaacaactcaattaatatttgttgaattcaagtgaagtaagtggatctcatcaccaacaacaaagtctttgatagatttttactcagtacatttgcatcctcaagatatttcaccatcaagtagagttcaaggttatccacagattcttcctggaggtttcgctctgtagtccgcctctcatactattgcatgccacagatctatgaatccacccttccagaaaatcagctaacactcagccatgtgctgcagtcctttgtcttctctctgcatgtcagcagtctgattgcaaataaaacgtgttcctcaatcctgcagtatttaaggcttttttaagaaagtcttactgaggaaatcaatagaaaaaaatggattattctcttttagcctataagcttgtttccttagacagttctaacaatcatactaatagcaggtagttattgaatgctttgtaaataccagatgtggtatgtgtaacatatatgtgttatgatctttatttttcttattaaagccaacaactctaatagggaaatacctaatctttttttttttttttttttttgagatgaagttttgctctttcacccaggctggagtgaagtggtgtgatctccgctcactgcaacctctgcctcctgggttcaagtgattcttatgcctcagcctcccgagtagctgggactacaagtgtgtgccaccacaccctgctaatttttgtatttttagtagagatggtgtttctccatggtggccaggctggtctcgaacttctgacctcaagtgatctgcccgccttggcctcccaaagtacagggattacagacgtgagccaacgcgcctggccaggaattacctaatcttaatgttctccgtgtgcaaatgaggaaactgaggcaccaggtcttaattaaaataatttactcagactcctgactcaaaagttaccactgggatacactttctctgtaattacacatgtgaatcatgattttcttctgaaataaattacccccggctccccatcctcaatttcatctcttccatacctcaacaagtgacctgccactgagttcagtaatcttagtgttaaaaatgctgtccatttgccttgtgtaaagaaatgagacttacaaacatctgcagcttctattgtatatttttccctcaagcttgaagtctttcttctggatggaaaccaaatgaagcctttcacttctagctctagcagagttgccattcatgacagtctcatttttagaccactgattctgcagcttcgcctatagttttgtctaaatctcagattggtagcagctggtttcagttttatcaattagatcttagagcattttgctattttaatactagttgaactaatgctttgtaactatctgcttgttttagtatgtcttagaaagttgtataaagatagctattttgatcttagtaaaattttcccacttttcttctatgtataaccaaaatatttttcttttatctcacacagtttattttctgttttttgttttttgttttttttgtaagtggctgtcaaccgctttttctttccattgccagaatatcctgtctacctcattttctgtattttccattttaaaccaaccttctagcttattttctggctactatactgtcctctaaaacataaacataaatgtgcacatgtcctgttcactagtccctgaattctactctagagtttatctaaacaaatagcaataatagcctattttcatgtctttgtaaaatctcactttatgagatatgtcgtcaaataattgtgtccagtcctacttgctgtgtttctcttccatgaagagtgcatatatagagatctctacagagcacaactccatcacgtatttctagtactgagggttgttttctctttttaaataaataaaaatatgtgaactggtccatggggcattatttttcaaatgttctcctttctaacttgaaacaaataatagataacattttataaagaacatgatgagacatggtctatgtaaaattttattacttatctttattaaatagatctaactttctataagtgcttatatattacagtaaacaaaattgaaagtctgctaggctttttttctgggctagtactatttttgtgataataatttaaaagttatcaaaaatgcttctagctacaaaattgcaactattgtgtgtaatggtagaataaaaatttattctgagatactgaaaggagaatctcataaaatagaactcaacttttaaaattccattctcacaaattttttaagtattcttttttaaaagattggctacttaaaaatgtttggctttcttaagtgaatgtaaaaacacattattaatgattactaaagagtaggtatcagtatgatacatataatttattatgtcttatagaagggattttgagtgggagtaaagaaatatttgtgaaatagaaaagaacatgagaattcataaaaggtattctaaaaattcttaagctgaaaagttaaagtctgtaacagactaaacacattccaaatgcctctagatattacatatggatgctatctctcagcatgtggatacttgatacatttaataggaaagatttgtgttgtgctttcagtgcaaaactataaaaatatgttacaaaggtaagggtaataattttcagtgactaagcaaagcttgaatctctgtttataaaagtctttaaaagcagtattttaaagctagaatgcaaatgctttgggtttagtcttccacaaatgcctaaaaatgcactataaattctgttagtatataaaacgtattgcttttttgtctcttgaaagccatacaactttctctgtcaaccaagcattttatattcagaccttataatgcatatctatatataacagtccatatacatatgagtgttcatatcctcaaatatatagaatcatttaatactatattatcactctaagatttgttttgtttttagcttttattccaagcctctgacataagctgcttgactgaacaagttttatatatatcagcaatatctgggcaaaactcacttgaaatttattaccagatttgaaatttcatcatattccacaaatgctgaaaactgatgtgctcctttttgcatttcttaatgataataggcttgcaaagaaaacacattaaaaatcaacctaatccactgatgagaatatatttaatgtatttattttagattgctgataatttagagaatacttcgtgcagagtgaattcatcatgcattttgcttaatgctgttctcaactttccagcaagaagtcaaaatttcaccattttcaatttggagcagaaagcatttgtagcagctgtagctcttaatttgacatctagtttcaggtcattttcatgtaaatagggaacaatggagaccggcttacaatttccataacgtggatgtttccttcaactttattattttcttatgacaattatattttctctgtgggattaacggagccagtaattgttcacagttattatttataatctttatgaaaacttggtagttctactctttagtactcaaaagctcccagtgccttctatatttcagtcatacacacaatccattaatgtttctagctgatcctttccttaatcaggggtaggttaggcaggtcaggctttctatttctttctataatacattttcttcaggctttgcaacctctttttctacctttacaaaagtataggaggtgaaaatttggaattgttctgttgaatagaactgatgccctattgaaaagcaagtttgagttttgatttatattgctttgaacatgcccatatgtattaccaactgtggcttcacagccattataacacgtaattctgtgctttttctaataaatattttatttcatttttcctctgttccagagaagaagcctactttatgctgaagcatcgatgtgctttcttctgtgttttttatgatctgtacagcaattttcaagtgtgttttaatggggaaaattttaatttttgtgtacctcttttaaaatatgttgatttatgcagattaagttaagtaggaagttatttttgtaggtagtcatttccatttgttcctcttctaggagtaaaagtaagaaatcagatagacttttaaacattttgttttctggatcatctgaacataccaataaattatgtactcttttgactttgaagttgtattagttgatataatcctgagcaggggtgtgtgtgtgtgtgtgtgtgtgtgtgtgtattttagatgtgctccctctgttttttagcagacactcatttgtgctcttgtttttttctgccccagtgatatgacaagaacagtggagatttctggggaaggaggcccattgggaatacatgtagtgcccttcttttcatctctgagtggaaggtaagatgtttttctcattccagaagctcatgctaatgaaaaccctgatttgagctccttttcccaaatatttttcacaaggagattaaatgtgaattctattattcaaatggatacctcaagacatacttctgttggccacttaagtgttggaaacaaaataaaataattgactttaggatgtaatggggaaagaaatcaatcactgtttctccatttacaattaattatgaaatactttcttaaagtatccttatcagtgacacatagtaaacagaatccttggcaaagatgttaacatattgttagacaaatgttgcaactgaattttttaatattccagaatatacttcaacaagtgagtataataattccaaattgatatatcctgttattcttcaagtatgtagcatttagaataataaatattctaacattttaagtagctatatctgatgctgtgtatgtatgatggctttataaaagcaatgtgtcatcatgctgtattttcctaaaatataatttagtcaattaaaaataatttaccacatccttttggaatttttaatacattatgttgctaaatccacactggtaaaaatggcattgtagatcgtatcaacacttcttgaaatttacatctatctaactggatttaaaacttgttctcttgatggaaattaaagtgtgtgccacagagttcatattacccctgttaaaacaattgtactgaacttgttttagatattatgtcactttgtaataagacgaccacatttagcactagattgatattgacaagggttgtcagaaacttaaaagaaaatcagtttttcactaacatgacatgattttagttaacttactgaatttattttcttaaacacatcattgaaaaggggggattccttagtttagtttaggatatcaaagacgagacaagtcaattgattttcccaaggtcatacaaaatccagctctcctaacttctcacttcattgttctttcaagaactaaaattttctcaaaggttatatagtattaatttagtggttctgaatatttattcaattcagtctgccctatagcgaaaagaacagatttagtcatggtattttggttggcatcatattcagcaggtagccatctgctacctgtaattgcgaagtcatcaccttttttttttttttgcaaataacatctgatgccaagctctcactggaatgaatgttccccaaaagaaatgaaccaaaaagctagcaactcttattgtctcatttcctgtgtgtgttaataagtgtgtttataaatgttatgggttatggcataggacaaactgaggttgtttttgatagatagggtgaatatttactcagttgtcatgagaaattctaatgacttttggcagaagtatactgacagaattttgtgaactaccagagctattaaatgaccaggctctttagtttaatgaaggtgggatagagcacaagatcttcccaatttccaaaaatgagaaaatatacagtgtgacagtcactagacttcattttcagtagttcagaaaacaagctgatcctatagatcagaaatcacattctctcacttcaaacgagggaaatacactaagctttattgatttcctcccttccttttcctggttctgattcctagcacaagccttgtagaatagaaggaagagtattggacgtggtttcagaacaactggatttgaatcccagtgttcttttttataaccttgagcaagtcccctaaacttgccccttttgagtacctactttacatcaaggttatggggattaaataacattaaaaatgtgaaagttccttgtaaaacacctaatgtatgaacgtgtaaatcatcagtctgatgattattttggctaaaaccaaaaagcctgattcagaaatgtagttttattataagttcatggttaactgttcagtaacttggtgaaatagttctattatttattttttgctatccaccagtattataggaaggaaatttaattaaaaaacattaaaaatgctatggaagtggagacatgagccaataaaagttaaggagtaatgagtacaggctgaaacagcacgcttaactcaacccatgtgtctagatgcaactgtgtatagagcatgtcagacaagtgtctgacttcataatgccatatggtttcactgtgtgagcacaggggcttcgttaaggtcatagtggtatactttgctcttaatttccttccatttattggtttgtgccattattttaaattagaatttacatttaatttttttactaagattactgtaattggctttgcctccaatgtatttttttatttttttttcttttagaaaaatgttgccacacctgttgttgaataagaaacctaatctaagttagatcatcctaataagtaaattatagtggctgctctgctagataaagcctcaatgaattcattagataccatcgcagaggggtgctgaatgctgcttgtattgagggccattggctttcccagtaaaaacaaagcaaacataaaaaaaacaccaaagttcttgcaactaaaatgcaacttaattttattcagatttttaaaatcaatgtggtttttgtgaattaaaaacatgaaatctaattcgtttcagtacagatgcataatatgcctcagtttcatagggaagacagctaaacaggagagagaaggagaaggactggatgaaggctgataaagactgtgagaagagatgttcaaaccaaaattctaagctggtagagtcactgaggctgtgtgacattgggaaaagaacaggaagggggcaaggagaagatgttggtgcctaaatgataattagaagagcaagaagaattgttacccctctaattctgtgaggctgtggatttcagcatcctttatcactgttcattaatgcaaattaactggttagtctcggcctataactcctcgacagcattaatctttaaattctgcgagtcttggtcccaaatgagacagctaccacagcccaccagttcagggcaaagaggataatgaggtattgttttctgagccttcttgtattggtctggatgaaatcaaactggagggaatctatcccttccacggagcagagagggcagaagtggtttgttgccagggaccaaactaataaaatcagtcagttttacattttaccaaaattacctctgacacatgggttttacagttgggcttattctgtcaataaatttttcatggaaagttagattatttagatcagtgaggttcacatagcatactccagctgtaatatgccagctaaattgcaacccagtggcccgaaagaattaattcatctcccaaaatgtgaaattaaatcctagggagtaacattacatgactgatgatgtactgaattaaattaaaggaagacttgaatgcttgttaaaaaaatatcacttacataaacacgtttataaccacatgtgagcctcctaatgaatcaagttattgtgaatccaccctaacaaaaatccaaaatgtgaactcttaggatgctgtttaatttagggaaaaaacccataagttttatctattattttaatgtgtcaaatagtttcatttttaatactgtgtttcaagattaaagtaacacagaatatgactaatttgctaacctactggaactaggaaatgaaccacaagaccccactgcacacttgtgcctatgaccctgagccttccctgcagtagatggcatggctgtttgctgttctttctcctgcagcagcgtgctgtattcatttaacattttgaagtgagacccaaatatcactgccatgcctgttgaggtcttgagatgatgggagctcattaaggggacagaggttcaactccgtggccactccaaacaggaggactactttctctaatacttgcattgtagattccccttttctatggctgaccctgttatttacacataaaatgtactcatgttttatttaggtttgaaatttaatgtgaaggtattttgtaatagcacacatggattttatacaaaagagagtgacaaagtcgaaaagcaagagtattgataaagtgcagatcacagtttctccaaatgtagcagactcctcttgcaggacatatctatctttcttactctggacacagctaagccttgtcacatcacgaggagaagggaaatcccacaaataagaaataatgaaaatatgtataagttccatttcttacggtttttggtttagttttggtttatatatgtaacagaattgtgtatgtatgtgtgtacacacacacacacacacacatacacacacacatattttaattctagtggctatagttttctttcttctttccttctcttccaaccctcctgattctaagctacagccacaaaaatccagaggcctctttgtatcctctctaatttagcctcttcttggttgaaattttggacaactcttcccaaagcctgccttcatcatgtcgctgccctactcggaagcggggtctgctagatgcccccctccaggtccatcagattaagttcattggctgtttgttcaaagcctttgtgtgtggcactggtctcccatctagttagctctcaaatctttgaaggctctaggcttgttaatgtctttagtttttggacttcagctgtcccccaaatgtatagtgaaattacctggtcctggtcctatgactttgtctcatactcctccatcctgatcacacaggaaacacccaacacatacttgatttggtagcaccaacaaatgggatccagcttccttctaaactgagtaatatgatctgagcttaaatgtttctttacttcttaaaatgcaaatttttagaataggtagtaagactgcaaaaatgttactgtgaatatcctaatgctctcccactgctaaacatcacgttgccacgttggcactaactcagacttactatagtcaggtgtgatgcccttctccaaaccacaagtctttggtgtcaactccagtaaactagcctttcaataagtttactgcaagcatgagaaatgaagtcgcagattgatgttggtacttatgcatatttatctagaagggctttttctcttgtagtcagttttggctttttttggattagggattaaaataacaaacagttgcctgaatataaagtaaaatttcttttgtaaatagaaatcaatatgtatttctgaatagttgcaagtggagaaataattagcatttattattcagtaattatatttcaatctaaattttgcatttaggattctaggactcttcatccgaggcattgaagacaacagcaggtccaagcgggagggactatttcacgaaaatgaatgtattgtaaaaatcaacaatgtggatctcgtagacaaaacctttgctcagtaagcattttttcattgttttatttactttcttgatccctagcatggttataagcattactgaactcattatgatcaaaatagtaggtagaatttctagtcagttccctttgaacgatccaggatatccattttcgaatgcttctaatgttttagcctactcaaaggtggcccacacatgtctctggcaggtctgagaatgctaaactacagaatatcacaagccttcctgcctggctgtctttactggggcgtcgttgaacgggtttgtttttcttgggctatgggtcacttaaactggtatttaacggctcttttcacagactgttggttcagcttattaattaactttcttggtgtcagcagtcttccttaaactaaaaaatctgtgagagatgtctgaggactcaccgaatcatagaaacaaacagaaaaaataaaataccgtctcctggccaggcggagtggttcatgcctgtaatcccagcattttggggggccgaggagggcagatcatgaggtcaggagttcaagaccaactggccaatatggtgaaaccccatctctactaaaggtacgagaaaaattagccaggcgtggtggtacgcgcctgtaatcccagctacttgggaggctgaggcaggagaatcgcttgaacctgggggacagaggttgcggtgagccgagatcgcgcctttgcactccaccctgggtgacagggagaaactccgtcttcaaaataaataaataaataatactgtctccctcaagaaatcatctttctgcatgtgaaaatgttaagggaatagcttcctgtacccaggaattagagtgtatagtaatctgatgcatatttttttaatgtgtgttggcattgcagtgggattctggaccaaaggactaagtactaataatccttgggagtcatcaccaccctcttgtttctgaccaaaacagctcctaatacatcttctcgctgggcattagttgtcaatattgtatgcgtgtttgtggacaaagatgagtggttgtgggtcgaggaaaagtgggtactggctgctaagtatgaaaagaaatgaaaccttagaagaatctattgtgttaaaataatgaatgatagacaaaactatagttagtaataatttttaatatactactgtgctttttcacaaggacttgataattatgcaaagcaatcattattacttctgttttatagaggtggaaactgaggctcataaaaatttagtatagagttagtatggagtagaaactgattcctatgcaagcaaaaataacataggggaactgaccacaggagttaggtggagttaggcctatgtgaaatcttccttctcccctaacaatttgcagaattaagcacttcagaaaggggggtgcggggtagggtttaaggaatcagattgcagttgggattatgattagttattatgtgctgtggctgctaggaacagagacctgaaataagaatagctgaaacaagattaacattaatttttcctagcaacaagcaaacgtggaagagggcactccacagttagtgcggcagctgcacagccgccagtgggtcaggcagcttccgttttctgctttgccatctcgccatgtggctactatccttcagtggaaaaatgggcacaagatggctgctgagtttcctcagtcacttctgagtttcaagaaatagggaagagaaacaggagaacaataaaagtttttgtctctctactgaaccagccgcttctaaagagctttcctttaacgccttcatttatatcttctgggcaagaaagagtgggaaaggtagttgtttgacctgggcacagggcatctagaggcatgaggaagaagaaaatgttataagaagtttgaggaagaacacaaagtgttaggtcataaaagtgaaaaacacagttgctctgtgtgagagtaacaggaagggtgcatgttggattgaaattccactgagacattttggcacagccaaagcacctgccaaaatgtctccatgagcaaacatggatgtcaaacttgaacttgtgtaacacaacccatgttagagaagatctgtactttagaaggatgtcctaaaagaaacctaactaatgatctgatccaaaatatctattttgctttttatattcactttggtaatcacttctggttagattttcatctttagaaacatgtaaaagctgtgggtcattggataaattatttcatctctctgagcctcaacttccatgtccgtgaaatgaaagctatttatacttaccgaatgtgctttctaaattagagaaggatgcatgctaataatgcatgtataagctagtgcaggggcacctagtgcaaatagtaagtggtaactagtatgtagttggcaaagtcattctgataggaatattgatcgtgtctcctatgattagccactgtgctgctcttggttgccatcctcctggggtactttagaagatgctgcacctcaaagcagggtcatcatacatttatcaactttctttccagggctcaagatgtcttccgccaggcaatgaaatctccaagtgtgctcctccacgtgcttcctccacaaaaccgtgaacagtatgaaaagtcagtcattggctctcttaacatttttggtaataatgatggcgttttgaaaaccaaagtgccgcctcctgtccatggaaaatcgggactaaagacagcaaatctcacaggaaccgatagtcctgaaacagatgcatcagcttccctgcaacaaaacaagagtccccgagtaccaaggctgggaggaaaaccatcctctccctcactctcgcctctcatgggatttggcagcaataaaaatgcaaagaaaattaagattgacctaaagaaaggtaattattaaattatgcctaatagcattctattattgtaacatgtaaaattggttaagagaaatgcattaaggctaatttagttaattctcccttcatttaattgtatcaaagaatagatttaagtgtatacttaggtaacttaaatttcttgaaattgtacttttttattcttttcttcggagtgtatagattattttaaacaagaaaataataaagacatgttgggaagtggaaagaatcattgcaaacctgatatcaacagagcaatattgtattacaacttaataccaaataggcatgaaaattcagttgtccctgttctgagcacgattagtgattcttgaagcatcctttaggccatgtccaaaaagcatattgtttttctaagacagtcttctaacaacaaaaatttactcctcagaaagcaaatatgtaatgtttactaatttctctgattcaacgtcacaaacatttaaaacatacctaatttcaaaagcatgtataatattttctttcttcatctttttcaacttttctatccatttcaagcacagatcagtgagaagagatcatgtgtgtacatgcatatttatgcagtattctacacacatacataagcattcatgtgcttctgtgcttttgttcattttgtaacctctgctttatattaccttcccccattgcaaccttctgaaattctgtgtttttcaagacaactcaaaagaaaccaagatcttatagattcttgtctgaattaatagagaatttatggtcaaaaggtagttttagaaaaactattaaggtctttcaaaaacaaataatgtatcatcatttaggatatgaaaattattctggaaagattctctgatcaaaatttcattcacctataagaattctattctgggaataaaatacattgactagtaggtacaaaaatacttcagtgtgcttatcaatcaggttttttatttaaatgcctcagttgtattttttgtacaaatgatccagctgtgtgtaagacacagatttgggtgttttgaatatagaaaaatgaatcagacacagaatcaccttaaaaatttattacaaagccttgaatgcaaaaatgaaagatacgacatcacatctgtactttggcaagattaatctgacagcaaaaagatacactgaagacaaggccaaacaacaaaggataagtaaagggtgcactgcatctgtctaaaggtggaaacataataggcatgcattaataaatgactggttgtaggaaggaaaaaagagaagaattacagtgattcctgaggtttttcagccagagcaagttgcataatggagatgtcattgctagaaattagaattttaagtagatgaggatatttgaaaaggtcaggatctggactggagagggaggtacatagtgaagtttgaaatgtgcatgatgacatctaggaagctgatatcaaaaagagacattggagccatagagatttaggtctctttcattggaagatatacttggatccaggagctggccaaggcagggagtctaggggacaaactggtctaagacagatccttgaggaacatctgtggctacatgggaggacaatgagtaagatttagagagagtgatggatgtgatgtgatcaaagataggaaaataatcagaaaataaagacatgaaaaccaaagagagtcaatttcaaaaaaaaaaaaaaaaataagtggtgggaatcatcaaagctagaccaacagagatggtcgcgggtaggtcactggtgatggaagcttgaagaagcagtaagatggaagtaaggatccttcagggtagagaaatctgagcatacctttagactgagtgaaaaatacatgagaagggagaaattggagatgcaggagaacaggacaggaacaacaagatgcttgctgaccagacaatgggatgcagcagtacaaggaattgagacacaagtagagggctcagccataggttgtccagctcatgtaagaggctgacagaacttaagtcaaatggccttttgcttctcaggaagtatgaagtcaggttatggtttattgagaagtcaatctcctgggcatctggataacatgtgcatttcttctagaacctgaataagccaaagtgttacacatctggattgggccctaaattcactttgatactgtcatggcctgtcaggaactataatctgcatttgaaacacaaataactgaagcatatttaaaatgtcccagaatgtaaatattttactgattctatattagtctaaattaggtagatcttactgtaagactgaatataatattactcatgcttaagatgactatacattttcctgttcttatacactaggccctgaaggacttggtttcactgtggttaccagagactcttccatacatggtcccggtcccatttttgtaaaaaacattttaccaaagggagcagcaataaaagatggccgcctacaatcaggggacagaattttggaggtaagaattggaattaatagttgtatgaaaatatttcttggcatttaaataatgccatttaattgcattgaaatatatgtaaatatattaatatttttattttgaacctaatatatattaaaaattattacttatagacaagataagaactttaactatagaactggttaatgaggagtctaactttgtaaatccccaataaggtcagtgatatggggccaaatgatagtgaaaaccatttctgatcttccctctcttatttctacctcttagagtccctgtgaaatttggattgaatctaagaattcaacatatattcagttagggctaaaaagttaaaaagtctttgtaatagtcttttcaaacttggccaggacaagccagagtatctcaggtcattctatgctttgtccatatccctatcatctgtgctaggatagcaatgaaaacagctggaagggattttgcagagagatatatttgggataccaaaagcaagagggtggctgtttgttttcatttatttttgtctgaggacattatcgtcttgataattatatattgtccatttacctttgaagcaaacatcttcattaaaagcaacactttagcttttcatgttgttctagatcatgaaagaagatgcaccaaatgactactgtagctccaaattagaatttcccttaatctatgataatctggtgactataattttctaaatatgtttaaaacctgcaggattctattgctaggttcgtatttgcagagaaatttgccttgtgatcatggttcactctgcttgttgaattaggcagaaaatggcgctaagtaagcctttgcaatctgctttctaccttaagcggaatcattttctggtatctgtcagtccagtttcccccacataagaatgtgatgtcttaggaaaaactgctgatattaattaccgactctgagttcatccagcatcatgatgatgcattatgggaaatattgttgggttttgcccatgtatttagttatcatcttttcagagcttcctcaagtatgggagcccatttgcttcttgttttcaaaaactatctagtgtagaaggagataacaagtattgtgattgtggctgttcatatgcttttattcattaggtaaatgggagagatgtcaccggacgaacccaggaagagcttgtggccatgctcaggagcaccaagcagggggagacagcatcgctggtcattgcccgccaagaaggacattttctgccccgagagttggtaatgttcagatctcagtctcactgaatttttaatgccgagcttaatacactcaatgaactcattatagctgagaaacgagttctaaatcacaggcttcattcataaccaaaattgaatcacactcagggtattttaccccatttggggtatcgcatttttaaaacattgatacagccagtgggtatatgtaaacagtgattccggggcacagattcaaacacctttagcaataagcaactattcaacagtatgcaactaattcaataaaatatatattgaatatgtgctacgtgcgaagccctaggcaaaacacagtcagcaaaataatttgtggacctactttaatgaagtttacagtctaacaggaaataaaaagatagccaagtattcaaaatggcgatgaagattatgaagggaaaatgcagagtgccatgataacatagaacaagggtatttaacctattcttgagggctgggatagacatcttgagaaagatgagttcaaaagccttattaaaaatgtatacccttagacctagtaactagacttcaagtaatctgtcctaaactgatgatcaaagatgtggaaaaaattcatgtacattgattttttcccctcaagttctatctattgcagtgatatattgggtcctgtataactgtaaggcattggttagataaataactagatagcttgccagtgaaatatagaagtacttaaaatggtttctgtaaaaaattgataatacccagcactttgggaggccgaggcgggtggatcatgaggtcaggagatcgagaccatcctggctaacaaggtgaaaccccgtctctactaaaaatacaaaaaaaaaaattagccgggcgcggtggcgggcacctgtagtcccagctactcgggaggctgaggcaggagaatggcgtgaacccgggaagcggagcttgcagtgagccgagattgcgccactgcagtccgcagtcccacctgggcgacagagcgagactccgtctcaaaaaaaaaaaaaaaaaaaaaaaaaaaaaaaaaaattgataatagcatgagaaaatgttcataatctaatactatatttaaaagtaggatgtaaaattatttgtgcagtatcattaaattacattttaaaacgttaacaactagaagcagatacatctgggatattggttatgagaggttttcattttcttttcttaccataaataaatattatttattttattgaaattgtgcttttaagaatgctatagaaaattcaaaaggaggacaggtgcagtggctcatgcctgtaatcccagcactttgggaggccgaggcaggtggatcacctgaggtcaggagttcgaaacctgaccagtatggtgaaaccccgtctctactaaaaaatacaaaaagtagccaggcatggtggcatgtgcctgtagtcccagctgctcaggaggctgagacaggagaattgcttgaacctgggaagcagaggttgcagtgagccaagattgcacgagtgcgctccagcctgggcaacagaacgagactctgtctcaaaaaaaaaaaaaaaaaaggaaaaagaaaagaaaattcagaagggattttgtagctaataacaaatagaaacaaatgtgataaaaggacttgtatttactccttgttatttcctttgaatctgtataagaattgacaaaggcacatgtaggttcccagagttaggttattggaacagtaaggattagttgacagaactgatgatgtttcacttgaagaagagaaattttaggagacatgacagttattatcaaatatgtaaagagttattgtatggattggaaagtagacctgatctgtttcttcagacagtttccaagtttccttggcatggaattttctttctccctttccttctctttcccatcatcttacccatttttccctttccttattgtgtactctggggagatctgtaacaaaatagggaaaataagaaaaaaagagtgatctgagtcatgcagatatagtccccatttccattcctctacttgactcctccatacccaaccatttgaaaggtagaatcctgaatgtctgtctcatctcctcacactttctagagaaatgatgcagaaacttggagtctggattttttttctaaaatacagatggattcttctttcaatcttttatttatccaaagaccttggtctttctctacaagggtcaaagtgaaaagaaacaataaaaaggggggcagttatgtgtatgcaccacaagaggccctttcatttcttgtctgatatttaggttgttagaaataaaaactctccaaaatcctcagtggaactatgtgcttatttctgagataggagagcaaagaaataagttttgactgtgtattccattgaactgtggtcctggaagaaataaaaccctgcataaaaacagaaatatttcaggcagcccctgagcatgcaaaagaatgcaaccacagaactccaactaggaacttaaaccctcgagcctgcagtttctgtctagtagttccttatacctttctcccatatgtcctctggaatttttaaccccacagttaataccttcttcctagaagctatgcccctccaccaggtaagggatgctgatttatcccagtttgaagctctgaattcattcctcatcaaaggcaattatatctggaagttagcaactggaataacatttaacattgtctctggagttcacatcccagaattcaacttctgtatccaccacttactagctgtgtgatgtagagccattcggaacatcactcagaggctgtttcctcatctgtattgtaagaattgttgtgaagattaaatgagataatacaggcaaagcttgtagcatagtttctggctaattgtaagttctcaaaatacgttagctataatttttttttctaatacatgaccatttctgtagtagtgtaaacacaattctatactctagatatattatggggtagatagatttatgcagccttgcctgggactaaccactatttttgaacaatgattgttttatttttttattattttataatgtattctgggatccaaaatactgagttaaaaacaacatttttataaccagtcaaattgataagggaggcagctgtatgtgttatttcactctcatttaatggaatttagtgaaatttgatttctatcccagaatgacataggccaagtccaccagggagcatattaagttaactgtgcaactgtgagattatgagtgcaaacaaattatttgttctcattgtttctagttctatactaaatttggagggtatatgcttagtattcattcctttagaagtttctagcaaatatctagactctcaaaaatagttgacagtcaaccatccaaatatgtggaattttctttgtcaccatagcaaagcaagggcatttgaggtttataagcacctaagtcacgtggacccatagccttcctattggagaaataaggaaaagcactctttttccagcccaaatgcctgcctcgaatgccaagaggcaagaaccttgcaggaagtttaaaaagaggtgatgtttggcacgtgctgggctatttcagtgggaattacttcatagtgtggcatacaccggcctgtttgaaagggcaaaataaagaagtgtgttatgtgatacatctttgtgttttcctttcaaaaacttgaaggtgatatcactttggtctcttcttccttatcatgattgatgtacacacttgactttccattgaaaatctggcaggatgaaggaaggacagcacttcctacttttgtcgtgttctatctcctttgaggaaaacaaactgtgtttattggtttcctcttctaagaaactgtcctcttttgttaagccttgctgttctgcgagctctgtaccttcttaacagcactgcactgcctagtttccgacgcttaaatcttccttacttccttgttatcgttagcttcttgtaaagtcttaacacttaagctaagggagcatgtggtcagcagttatacaggaagtcccaatatagaattgtctcttggatgtgactctgtcattctgaaggccatggtatccatttcctggtcatttctcctgacctgccacctaaaagaactgtgctgaactcctatattctagttcgtgtccttcctgagcaattgattaacgtcccaagtttagcagcatatttagccaaccttctttccatctggggcagaccgggttgaaaatcaagtgagaggaatttatataataacattacaactatttagctgtttctagtatctttaccaaaagaagggtatttcaaagataatctttccagaatcccattctgaaagatcctttggtgtcctcaccccctgactgggtgagagtttactgaagaggtgttcacataaggaacagttttgcagaaggtactttgagattagttttggtaatagatttagaatctgaaggctaaactgctgtgtctgtgtctatacttgaaatgaaaactatgctagttaatcaactggtggtttgcgtggtcagttctgtaagagatgtggcctacaaattcttttctgtctctgatacctgaaattctttcttatgctaaatgtcagataaagccgtatttccacttaagaaagctcctgaaaaactgaagtttttctgttaatttcatggcttcatttctttaagagctagagagagaaggagaaagttatttgctatgtatgtgtgtgtacatgtgcatgtatgtgcatgtcttctttttttattgggtagaaaggaagattctgccctttctttgttaacctctttaacgtttcattttctgacctgctgccttatttctaaatcatcctgaaaatcacagcaacccctggtgggtaaaatgagcttaaaaaatttcaaatgtatttataatttctacctgccacgtttgcctgctatttgatgctggcctctgcaagtgagattaactgtatttcaagcaagcaagtttctcctgcctggcatgattgaaaaccaaaagttagccatgtttgtcatgctgctttgaccttcacttaggaatattgcttttgctgagaaaaaatgatgcacatgcatgtggaaccctacttaacagttgctgagcttagtgtagtccaacactgtcatggttacctgtccctgtgactaccttagcatgcgagatgtggttccaactctttcttatttttaagtaaaaagttcacatcttgaaatgtcaaattatttagcatcataaattatagaattttggtttgaaatcttagatgaacctcatttaaatgatatattatttcattccctttggctatttgattcaaatgattccatgcttaattaactgagatacttaaggaaaaatgaatattatagcagttatttgtggataagtagcagaaattgaaagataatttcaaaatgatttttctacctaaactaatgtgcatgagatatgttctggaatttaaataattatgcaaaatccaaagtaccttgctatattttatgtattctccaagtaacacagttcatgtcttatgatgaagtccttgctaagacagagtttctttttcagcttttccctacaataatttccattttcttcttactgcattttcattcaaccagtatgtactgaatcttagtcaaggctctgcaacatgaacttccagagatgaagctagaagcttcatctgaagatgtgtcctgtcttcaaggagcttctagcccataaagaaaagaagagtgataagtggatcaaatgagcaaataaattgttacagggattcaaagtatgtcaggaaccaagaaaaccttcaagaacatgacagcatttgaaaaagagacttgagaattgaataaatttcaagatgcagagccacatgggcaaaagaaatactctcttcagttactcagagattagaaagtactaaagtacaataagaccgtaagcagcccagtttgacagattaccgaacaggagactaagatgagaagtagtgctattttgaataagtttggaggggaaaaaagatgttgggatatctattaagagcttattgtaattcactagagggtaccagtaaggagcttgggacctggaatccgtcacacctgggttgagccttgactctatcacttattgattaaatggccttgatgaagttatctccctgagcctccattcctcttctgtaacacagggactagactagtgtctacccaagagactagttgttaggattaaatgagatgcatgtaaaatgcttacattgggccacagagaatgggatttaacaaatattccttgttattataaccattgctcatttgaatgagagatattaagtgcacagattagattttcccacctgttaagaatggagagaagaaaatattgtggtagaaaactttggttttggcaactggtagatgtgggagtgaaggagtgagaaatatcaataattccaaagtttttaatttggctgtgttgtgatattattacttgttgcaggagaaaacaatttttattatcctagagttttatgactttcatgaatcccaagctgttttatgggccagtgagcctcggcatttttcttcccctactctctactctcattccaaactcttcatctttgaaagggaggacactcctctcctcccttttatctcaaaactccttaagatatctacttataggtcatttgcttgggcaaagcttccttgaacccccaagtctagtttatggaaccttacgcagctttccatccatattaagggttcacctcagcatgcgcccgaatcacacaatattataatttctccaatagaccttaagaactataaagaaatagtccttaagatgccacatttgggaatctcatggcctggatgtgaatccctgctttgcaatttcatttagcctttcagtgtctcaatttcctcatttgttaaaaatgaggataaaagcaacacctaccttgtagggttgtgtgagaattaactgtgtgcagctgttgacgcacagtgagtgccaaatcatattaatccttgttatttcctgtgcctagagcatagtgtatgctcagtggatatttgttgactgaatgaatgaaagctacgcattactaaagttggtgatatagaaggctgggaaacgtattactaaatgagccattactgctagtctgtatctagtctgcattcagtatattattatcctgtacaattcttttaaaccaaattaaaaaaatatatgcagggattttctctgagcaatagcgatttctgatttacagctgcgtgccacaatgagggttaggatagttttccatgtaaatgacagcttcagtggtttaagttaccatgatgacatttgcacaatctagttgtacagtttacttgtaaagacatatgagagccataagtatcatgttataatttgaaatgttagcggtatttttacagtatcgtgttaaagtattttaaatgcttcaatttgggctgcaataatttgttagaacaatggttctcagagtgtggtctcaggctagtagtcttggcatcacttggggatttggtaagcatgcagattgccaggctccctccacacctactgaaccagaaattctggaggtgggcttagaaatctgtattgtaacaagccttccagataattctggtgctcactcaagtttgagaaccattggaatagtggtttcattataaagaacatgaagcctgtaggataacttagtggctattgctgactagcttcagtgatcaaattttcaactttatgtctcctgtgaaaaatgtcttgttctgggaaaaatattctgtgaaattttttaagcccagttgagttgtgcctttttggctatgtgcccctcattttggcaaagggccagtgctgagtgcaatgcagttacccaactcaattacccctgattcatttaggcaaactcaattgtacttgactttctcaggtccaactcgattgtgctttaaaatttccacactcaatttgattgtgctcaaaattttttatgtgccaccttgtaacttgtagattcagacacatatcacaggaggtacttttgagagacttggaatattgggttgttggtatttgtttgcagttatacccatttcccttcttcctttcctcttatcacctctattggaggctttagggtaagatatgttccattgaccccattacatggacaatattccagcatccacccttttactatggttggactcaagttagagatatcacagattctaggaaagtgatccttaaactgtcacaaagcaactgtgcttagtttccatttatctcattttaaagatgaaagtgaggtacagaaacactgccccttaccagcatttacatcgtcaaaatcagaaatacgactgggtgtggtggctcatgcctgtaatcccatcacttcaggaggctgaggttggtggattgcttgaacccaggagtttgagaccaggctggacaacatggtgaaaccccatctctacaaaaaaaaaaaaaaattagccaggcatggtggcacacacctgtagtcccagccacttggtaggctgaggcaggaggatcatctgagcctagagaagtagaggctgtagtgaaccaagatcatgccactgcatctagcctgggcaacagagtgagaccctgtctcaaaaaacaaagtcagaaatagcttttaagtaagacttccacctcactgaggtaaatgctgtaccttctctcacttgtgcaatgtgctcagagactgggtccttaatcatggccagctttttgaatgtgctcaatagcccacaaggccaagggattaatagtcatttgctgctccctaagaagtacttatatctggaagaattctactgaactattgtcagcaaaatctagtcttgataaaataggtgatgataaatgctgtggttcagcattattaaaacagatggaggaagtgcggggctattttgctgggttgtatggcttccaggtgtcagaatgtaaatacttaatggcttttatcacaagatgggttttgttggagattggaaggtagtggaaggaggagtgttctatgttgtaaagatctcatgacatttcagaaaactggggcctaaatacgttgtcttgcaaagttaacagtgaagagctatgagatttggcctcattttcatggtgcatgacatatgtcttattagtggcgactgtggctatgattatgcttctggagactggagaaaaagaattttctgaatttatatatttgaacagctcggaaaaagtcatattgtgaccaaccacctactatatcttatcatccagttagccaaatgttaccagtaatttaggccagctgttgatttggagcaagctggataagaagttggttacaaaacttaggggacaaccttgatttgcttaattgcctccatgcctgtgatcagtacatttgttaaggtacatttggtgtaaggtaaggaaatgtgttcattttgtaaaggatctttaaagattagggaaaaaaatactaccttaattgatggtggttgacttttccagctgttatcaaagtaaataccacacatgtgaaattgccactacagtccatctcattttgagagtatagttagaagtctgaacatgtttcatctgcctggttttccaggaaaatgtgtgatctttatcattaaagaatatcagcttaagatcacctttttttttttttttccctaagggctggtaaaacagagatagacacttaaataacaatctgttgctacttacttcttctcctgccctgtccccaaagattctctgggcaatgacttttaaatatgttctcattatttttaatgagtgtgcagaacatatgacacataacgcaacagtagataggtgcccttttactgaacctgtcggatacaatcaaacatcgcaggggttaagatgcatttttctttaagatactataattatttaaattaagatgttcaagtacacatcacatactattcaattcttgctgctgcctaaatgatgccccaccacagtcccagctctctctttaaaaagaatgttttatcccaaatgttaaaaagaccaaagaacatttaatattgttatgtctctttaagtttacacttcttaaaatctgtcccggatggcaggatattcaattataaacgagttcaatgatgtttccttgccactgattgagttatatgaaggacttctatcacctagtctttccgtaattaatcctttgcatttcttagaggtttagcactgccccccacacaccaaaaaaaggattgtttaacggcttgaaatgttgtttcaattttcttatatttcttctttctcccctttaccttcctccttttctttccattcttgcttctgacctcccatcgtacctttctggaactaagtaacactctatgtgtttctcaattatatagaacttatttacttctacttcacatgaaaatgccaggtggtggtggacataatagtacattacattaaattacattaaatgccattgaagatggcagtgatggcagtagaatagagaaagatatcagctctgagaacagcaaagctgcctatgctatgcattcgtcccataaatattggagcctatggttcccggcttatggaaatgcctgccttagcactctgcaggtaagttacagactttccacatgacttgaaagagctggctttcacccttctctccttcccagcagctatatatttcatctttagacccttgacttcccactggaggagaaaaacaaacagaaacaaatcaacagaaaagcaaacaaacaaaaaacagcacaacagaaaaacggccacccaaaacatcttagccatgatttactttcactccatctctctgaaatgaaatgttctcttctatgataatcaaagaaaggttgatgttcagaagaattgccatcttccacctctctttcccttttttctgggtccacattggagatgacaggaatcaattgttcagcaagtatttactgaacacctactattcccagtttagctgatcaaatatttattgaatgtttatttttgctagatgctgttccatgcagtgggtattctaaaatgtactaaaacatgattctttaactccaggagttcatagataatgctaagtggtattagagaaacaatataagaatatagcatggtacctgtcagtagggaaagctaatgaaagaaaaatagttgcacaagtttcaggaagaggttaaggggctaataaggacataaaagttataaaaaggaagaaattaaagttctttaaagtcaaaagactttaaaagtcaaaggactttaaaatcatgaaagatttcgtttatgaggtgggactctggtcaggccctagatagattcgaagaagcaagaagagaaaaaagttccagaaatatggacaaataatgaataacgaacatctttccgaaggcaggaaagaaaactgcagaaaaggaaggaaaggaacagaaaggaacatttttgttagagtgacatgttgttggctacttatgctatcatttaaagtcggtaacaagaccacatttttttaaaaacccatcagatgtgaatttaaaatcgaactaatgccctcctttataagttctatgttttagttatctcttgctatttaacttaactacccaccactttaagagttaaaattatgttttattatttctcgcagttctgtgggttgtgtgacttcttcccctgccagtttcgtttagacttatgcatggagctgcattgaaccagagagtctactgggcgggaaggcccagaatggccttccttacacgtgtctgtcagttggtactctaatagctgttgggtgggacaccatggtcctccttcatgtgccctcccaccctccaaaaggctagttcagtgtccttacatggcattctccaagacaacaaaagcagaagatgtagggctcataagtcttaactttggaagttgcactgtgacttctgcttcatccttttggtcaaaacaaggtcaagtcacaaggccagacaagatcccagggatggaggaatagattcctttcaggatggaaagagcaccaaatcacatttcaaggagatataattcatggagtccgatagggaagtgggagtgtgcactgttctatagccgaataagtattggtcagggatggaagattcaagttatcagcccaggactgtcagtagatggttgagttttgaatggtcgtttaatttcttgagtcttaattccgttcatgaatttcttattgggaaatcttttcccaataattcttattcttattttcccataaattcttgtttttatgcaaatacagtgttgaagatacagagtaggccaggcatgctcctttcccctacattgctgtttagcagcgtttttacctaaaacattgtggctcttgacatatacgtgcatttctctcttatgctggacaccagtctccctagatgaagaatgtgctttcccctcccgttcttctcccacctcacatagagaattactcttttagacatctacaatctgaattggcattgaagaatagaagtttagttgtatagatgttgataaactaaattttagtatttaaatgctgaaattatcaaaaaagtaatttgacaataaagagggagaagaattttttttatctgtaaaaggaggaaattgaactgaattgtcttttaagattctttcctattccaaaataacctctaagtttctgtgcatcaaatcttggcatgacactcaatacagacagtgcccaaattatgaaagatctgtatatatgaatgggaatgggctgcatgaattctcttcttagtgtttgtttgttccatacttcagaatgtctggggaacatttgacctagagattaccttaagtaaatgtagagctaacagattgccaacagatatctttctcatggctacctcttcgacccctgccatggcaacgcttgttgccatagtagtaggcacagatggagcccttcctccaatcctctactgatgccaccactgctgtgggtagcataagggacttcactcccatagccagctcagagggaagtgtgatccttcattcctgaattggaggtttcagtgtattctcccatagaacatggttaactataacccatccaatagaatgcaaattattacttactagtatgttttggagataccatggagtaaacaagcactcttggctaagagagaaatgtagccaaaatttatcagtattttttttttttaagaaaaacaaaggctcaacgtgcaggcaccaagtttacagacaaacttatggcatcagcctgttttctaactagaaattgccttgcctgtacccacacccacagtcattgtctacttaaagcttgtttccattacacattaaaatgaatgaattacaaacattattcattaaggttttggccacctttaataaaaaaaacctctgggttctggattcttctattagaaaaatatgactatgtcaacactagcaacttgttggaaactgggcgtatattttcagtgtaattattaatgcaatcacctcaattcctctttggtattaggttgcaaataaattatataaataagtattaatgcaattattaacttgataattttatgtactatgtaggcatgcaaggaaattaaacaaagatgaaggctgctacatttgttcatgtttgggatatacataacagtgacttattctctatatcataaagagatagaagtgtactagatagaactttgtcttcagctgtataactgagtatgattgtaaaaaaaaaaactgagtatgattttcatggtggttaagttaataacatgtcactattatttgtgcccttctaaaacagaaaccaaataaatcatgtgtgtcctaactggaaagaaagtaaaggcaaaaagctgcaaacaagctagtggcttacttattaagaagccaagcttttgctgtcagatagcagttcagaggttcctctttaacctgtagggtttcttgcagaaaagaatactgatcgcatgtgaatgtcttacttccttcacaaacctttgaaaatatttcccaaagattgcgttgcctctgctcttagctcaatagctctcaagggagttggcatctcttatcagaagcacacagccaggccaggggcagccggcacattgagaggccagggcggagtaatggccaaggccaccgggcaggtagtgaaaggcccctcgctgtgttaaacaaatgcagtttccttcctggcttccgctggagctaattttgtttttcacttctcttctggtatatgaacaataaggatgtataaggccattctgcctgtgaggagatgtgcattagattatcataaatccacagataaaaagcacagtggtcaatgagaacaggcattcttggatgaaataaaaggtttaattgaaagtgtggtcccaggggagacagatgattgagcgtggtattgagtagacattaattaccatagtccagagagtgaaaaaaaaaaaaaaaaaggaagaccgttcctttttttttttttttttttaaagtttccaaatctgtttctctttgagagaatatgggagatcatcctaataggatgttaggaaaacaaaatgagtcttgcttatacacagtattcttagaatactattaatgtttcttaagaagtagcagttgatttttctaatagatatttttgttcgaagttagagatctagacaaagtacaatgtgtactgttatgctgaataatggttttaaaagatatatgcatattgaattataacacattagtaaatgatttgtacttattcataaatctagaatttttcattctttggttatatctctcagcatttttttggtaggctgagattttcttctacaatttagcagaaaaaaatgaagtcgaaaaggcatctgaacatacagtcttcattaaatattaggccactagttttgcattgctgaaatatggctgcctttataaatcatacatgtttgtttagctagtgccctacttttgatgtggctaaaattatgggaagaactctacatccaccgggataacggatggtgtcaagaactgccttaacaagaaaataattggtcaggtgtctcttttaacagtcattagcatatttgaattatgagtttggttcttctttcgggtcaaatagagtataaaagtattctgaattatctgtacctaatgtgcaacggttttgaaaggacaaaaactgggagactgaatatattaagagtatgttactttgtgcttgcttacaaactgcttcccaattccgttatttaagaagaaaaaataaaaaaataaaagcaccaccaactgtcagagcaacttttagttggcttttcagttttatttagaacaaatgaatttgctccctgagtgaatttaaacttttcaatcaattgtttagatgttgatgtagacatagtcttagttttaaatgtgaaaaattgctttttttggtttaatttgaacagggtagttgccaaatagcaccagctgtcataataaagtagaagtgaatgacagatttactccaccccatatcaaaactcagaagtggatatggtgatcaaatgagccaaagtaaatgtaagatcttagaaacatttgcaagctattttcttgcatagctcagcccttcatgtgtatcaaagtgcaaacaggttacggttatgcttagcactattatggcaatggaaaaaggggaatcactttgttactgtagatatgccaaatatattatctaatgttccaaaataccatttgatgatggtgatggtggttatagtgaatcttgtttttaccaaatacactaccagtctataagatggtattataaagtattgaaactagaagcttaattagcagtttatgaactgttttttaattttaatgagaacgtggcacatactgagctacaacggaagaaataactgcaggagcacttgttgacaatgttctttaaaaaatatgtaccatacacttgttcttaggcatggcgttgggataagggacagtggcataaacataaaaatggagtggtctctgttgcccttaaagtccttaaagatgtacataataataaataaccatgatataacgtgattagtgctatgcttttattatgtatagagtgttttgaagacctagatgagagccacaaacagcaggtgacaattaagatgggatttgataggtaagagtttgctagtgggtggcaaagcagggtaaagagagagcataagttttaggtggagagaatcccatttaaatagttaaagaaggtatatgtaacatttgattaattccagtttcctttactaaacatgataaaaagtttaggtgagaggtgttgaaaactatgattttggtagataagatgaaagacatagtagtcgcttttgggagggaacttaaatacaatttcaaagaggtattgtggcagagaagtgtcaacaaaacatgtatgaagtcatcgcataacgaatacttactagatgcatacattctgctggatgctaaacaggaatcaaagttgaattaaacataatttctgcccttgatgagatcacagtggtatagcagagttaagatagacaggcaaccaggcacagtggctcacgcctgtaatcccaacactttgggaggccgaggtgggcggatcaagaggtcaggagtttgagaccaacctggtcaacatggtgaaaccccgtctctactaaaaatacaaaaattagccaggcgtggtggtgcgtgcctgtaatcccagctactcaggaagctgacgcaggagaatcgtttgaacccgggaggcagaggttgcagtgagccgagatcacgccattgcactccagcctgggtgacaggatgagacttcggtctcaaaaaataaataaataaataaataaataaataagataggcaagctggcaaataattgtaagaaagtgatgcgaatcatcagaatgggaaaacataagtgaaatgggagctgcgagaagggcatattgttcctgtgctgataaggtcagggaatagttaaaagaagaggtagcttatgtgctgagacataaagcatattttgaaatattgtgcaaagaattcttaattccattaccccttcattgtgaaatttcttttcagttgaatattatgtcagcacttgatatatacacacatgaaatgtgtttttttccttatgtatgatttcattaagtatcgtaaaaattgtgggtttgcgccatcagggaaatgattgactaaaaagattcatccacttgtggtgcttcgatgagtctttctttttcatgtatcagcaagtaaaaacggggctgtgatggattaatttgaaaaaattaattccttaggcatgaactgaactgagatagtacttgtttagtctttgaagcatacttaactttgttggaaaattaagatccattagttcagggaagaaagaagtcctgctcaacctacatccagcaaaatattgattggaagtgtgctgaacttttaaacttcttgtaattacacactgattttacaggaattaaggccatagaaattgctcccttacccttgtcctgcttttctatacatataacagcacgggagaggaacacttggaagatgaatactgaggaagagtaatgtgaaataaaagacaatattcagtagcccgagccagtattttagggctctggagccacctgaacaatccccttcaagaacctggcatgaacagtgcagggatatgcaggaagaattttcctgaatctaggctatgtatttccctacttcaggaaaatctcacaaaccaagatgctactctgaggttcagagcctagaagcaatatatgtgtcaaatagaaaatgtgatacctaagagaagggaaagatgtgattcagagaaatataaattctataatatatcattaacccttgataggtcccatgtgttccaccctcctccccctaaaaatggcatccagttggtggatgggattattagtttttattctttactttcaaattgcagcattatatagctttggcatagccccatggtgtttggagagtactttccaaccataggctgtggacttggccatgcgaattcatttggccaataagatgttagcagatatcacgtgagcaaattcttgaaaggttattttgttttttcttccttttatcatgtgataaatatacttcaggcatgtggtggtccaaggaagatgggagatatgtggagcagacgtatacctaattcatagcttggaggcaagcctacatgagcctagcatatatcagccaaacctcagccaacctgtagatatatgagccagctataaatgctttattgtgcatatcataatttggggatgatttgttatgcagcatttgtgtgacagtagctgactgataaattccttcacttttccttatgaattaattctgggtagatttcccctctcccttcaatttgtttgtagtatgatgataggaagatatattcacattttaattttaatggatttgtcatcttctataagacctaagtgacttcttattttatagtcagttgtatctgacaattttaacagagtaattgatttaattattaagataaaaggcaaattatatgtttttatctacaaatgacatgttgtagatatggtaagaactttttcattaaaatagtaaacatgtactgtgaattttaagtggttgttacccactgagatttctcaatctctacttggaatttcgaattatttatcattaacagcatactaaaggggattggtatccagcaggaatcacattagatgcaattcaaacgtgagagaaaaggatggggtaaaaagggctatgcttttattgtttgattttcttagaagctttaaccaacgaaaagaaactccccgctcatgcccctacaaaaatactgcctcttttcgaggctgtggtagtattgttactacattatagcataatttaataaatgttactccctgagccttaaagtgaaatacattcactgggtcctctaaggaaaatgaagatgattgagatgtaatccctgcctttaaaatccttgagttgggaagaaagctatattatctttattaagagagttattgtaccctaaataacggcacatatacctaaacttgaggtggctgtgtagaacactctcaaatttctactctactggtttaagattatattttttaactatggcacttcctaagatctcagtgaaaatatccagtaactaattgtctttctgtacagaaacttcccaatccaaccctccgccgcccccgcaaaaaaaaaagagaaaagaaatttctcatatggaaatgaaacatcatttatccatttatggaataaagacaagactcaattctacaaatttcagaacgtacctgctgctctgcatctttaaaagccagcatgaggcagtactccacttttgtgatactctgtttttaatactaattgtgaaatatgtcatttacacagaagtgtgatgtagaaataatggaactggaaggtttaatcatgcagctctgtggcatctctcagaccttgctggtgacctacaaggtatctctgtcctctgctcctttccctctagcccattctcccccatgttctctaaggcaccattgctttaagtgtatgctagggaaaatttctacggcatgctccgtgtaaagttgttttcatggccagggaagttaggaaaccctgcatactctgtctccctctcaaagactctgaatatgttttaactttaaaaatagcctccaagaagtcaaaaaaaaaaaaaaaaacaccttttcccccagattttttcatcatagacaccctcattctctccccatatgcgatggctgagagcctgtatattagacattggattgatccaagttttagagggagccagtttggttgccttcgttggtttctgaagccagccctaaatgggcacagccttgggccagacctcctggggaagcgccagcagcctgtggattgactgtccatagcgaagggcacctgcacatcagtcggtgccacccttgcttcctgggtgcaagtctcatctgtggatacagcaggcaccgtagcccatgtactcactttaatgagatgctctgtactgtcatttatgtttcattcttgtccttgatgttgtgctatcttttaaagatgttacatgcaggtagcctggcatcaaagaatttgtgatagcaaagatattggaagtatcttcctaagggcccagcttcccaaatgggctacttctcaggatcaggcccattatgctcccttttaaggttattaaattgttacatcaggctgggtgcggtggctcacccctgtaatcccagcattttgggaggccgaggtgggcggatcatgaggtcaggagatcgagaccatcctggctaacacggcaaaaccccgtctctactaaaaatacaaaaacatttatctgggcgtggtggcgggcgcctgtagtcccagctactcgggaggctgaggcaggagaatggcgtgaacccgggaggcggagcttgcagtgagccgagatagcgccactgcactccagcctgggcgacagagcgagactccgcctcaaaaaaaaaaattgttacatcatattgtttgttcctgaatcttatgttcatataaaaggacacattctttttttattttttgtttttttgtttttaagatggagtctcactctgttgcccagggtggaatgcagtggagcgatctcagctcagtgcatccttcgcctcccgggttggagcgattctcctgcctcagcttcctgagtagctgggattataggacccggctaattttttgtatttttagtaggaatggggttttgccatgttggccaggctggtctcgaactcctgacctcaagtgttctgcctgccttggcctcccaaagtcctgggattacaagcatgagccaccgtgcctggccacagtcatgtattttaatcactaaattattgcatgtaaaatataatacttaagacaggtctaatcaggtttctctaatctacttttaacagaaagaagtaaaaacaaaacaaaacgtcctattgttcctcaatataaacaaagcaagttgtagttgtataatttcatattgtctgaattataaaatttctatttgttatttttcatgacacaaaatattatattcatttctttaatctttatctggaaagaaaaaacttccttgtgtcactaaacattgaattttctgatctttcaaggttatatactatattcgggggagagggttactgtaggaatcttaaatctgacttgctttacttttgttagttttaatctctgacttaatattatattaaggtacaatattacattaaggtactgactaaatattacattgaacaggcaatatggaatggccattttctgatttttattttctagtattagattaatcctttacttaaagaaaattggtttttggtaagttgagtcagagatcggctcttgcttttagtagtttcctccctctaccccctttcatggggatgggtttttaaaaacatgaaaaaaaatgtctgaattataaagaatgtctagaattgtctcactcatatctgtcgtcgaaaattatttcaaaggaatagatacagatttcaggaagtcacataaggacgtatatttaagatagtcacattattggactaactataacctatatcttaaaagttttcttttactgaaagtaaataccagagctggttacaccgagctctgtgaaactcttctcttatttattgcaacgttaacttacatttttcctttctttatgagtgacgtaatattgaattttgagttaactctcaacaaattagagtacaattcagatgtgtgtgggttttctaatatatatcagagatcatagggctatacagacaatacagacatacatagtctatattctaatttatttttgttgtctatagctagacaatatagagtatatataatattgtctgtattctaatgtattttgccctctagactatatagtccatattgtctatctatctatatattctattttctatctatagtctatcatctatattgtctatctatatagtctgtgttgtttagagggtgaaatactttaaaagatcatctacatacttgtaaatcaccaagattacatcagcagtagtaagggaaatgtcctttactatttagtataataaaaatgatcctccttagatcacctttttctttgacatgtgcctgctcatctctcatctttttcttttctttaccctcagaaaagtacaattgaaaataaaatgcctccctgctgttgaaatgagtctctgatccctactctaggatgatatccacattctgaattttatataatccaattggccaaaaacctttcatgcttataatagctacccagtgcttcttcagaagattaaataatttcagaaaattaagtgtcttgcaggtgtcttatcctttcattgttgtgaaaatttatttagctgtaacaaaagttttgtcaccttaaatttcttagaatttacttaggcaaaagttaacaatggataagcttattataaaatatcctggcagaattgccagatatggcttttgctttatatattttaaaagttattctttttttaaaaaaaaaaagctcttttgtttgagttttggtaattgacaaaatgattgcatgtgaaacataattcttacataaagtaagctgctcacaacacagactaattacacatttgggaggcaaggcaaagacatccagaggttgctcgtgctgagccaagagcacagcatttaatgaaatgagggccataaaaggttcagcatggatgctttcaggtctgagctgggcttctgggaaattggatgttggccctgtggactggtggattcccctgggctttgaaaggctgggttattaccacttgcatgcgtgaatcaggcactgctttgcagtacaagacatttgtgattccagagatggccttatttggaacactcttaaggtaatagtatggatgtctccccagtcatccatcttccttcctctctttcttcctctcatgccaagtaattacttttgatatttgttttctaaaaaatggttagtatatctagcgaggcctgaccaggtagactcttcagtttcctctttccgattcttaaacccatgttggccaggctggtctcaaactcctgacctcaagtcatctccccgcctcggcttctgaaagtcctgggattacaggcatgagccactgtgccttgccccatcctggattcctatataagtaaaaggaaacattttatatatgtaccaataagtttgttttctaccacccgtcctcctctgttcatcccacagagatcatacttcctctggaaaattagctgccatgtaactagaaatataacaattacaggattctccagcagttcattctgaccaactaagtgttcagtcatgaacctgtggatctaacactttttcatcttaattgtgctgaagtatctcctattttctccactcagagatatctggcatccctcacagtaaaaactgccaccccttcctgggacttggaaacatatgaacaggcagcaatgcagcctgttgctaaaacaccttctgggccctggttgctttgaatttgactgcatttgccaattgttgattcagggcagtagttcttaattggaagtgattttgaccccaggtaacatttggcaatgtctgaaagcattttaattgtcacagcttggggaagggggtactgctaacgtctggtgggtagtagccaaggacttggtcaaatatcaggcactgcattggacagacacccacaacaaaaaattatcaggcttcaaatatcagttgtgccaaggtcaaaaaagcctaagttgaaggttctgtatgaccagccctgggcaggtgctgggcattaggcctacacctatgcaggggaggcattagagcatccattctgggcctggctctgggaatctcaaggacagagcctctagtggcaaagaataacaagtaatgaaaagatttaaaactaaatgaaattcacaagatttcccttactacgccagccaggctctgtgtgtgtgtgtgtgtgtgtgtgtgtgtgtgtgtgtgtgtgcacacacgcttgaaatctgtgagtggaaagagctgttgcctgaaagatggaaaccaggagaatccgaggtctagatgtgccactgcttgggggttcgtcatatcactaaggtctggcatttagggcacttggtagtactttatacccatttccattttgctacaaaatgctgtctggcaagatttgagtttaattttgagagttactggttgaaccaggattcttggagggaggcattcagcatattgatttttttaatgttagataaagggacatttatttctaacagaggaaatggctgtgttaactactgtaatggtttcctttaccatttgggaagtttgctattattagagggcactaattatggcttaagcctggtacagcataagaaagatataaaacataactgtacttgggtggagaatgtaaatggcatagtgtcttactgtcattgtagaaatctgtcctggaatttcttgagggtcaaatcatggaatggacaaaagttgagacacaaggatacagtatagtatggcagtgaagagtctgacagttgaactcacagagtagaatggtggttacaggcacagaggaggaggagagtggggaaatgttggtcaaaagacacaatctcagttaggaggaataagttcaagaggtgtatcctactacatagtgactatagttaataacattgtagtttatacttgaaaatctctaggagagtagaatttaagtgttctcaacacacacacatacaaattcgtaagaatataaggtaatgcatatgttaattagctcaatttagctattccacaatgtatacatagtttaaaacaccatgctgtactccataaatatatataattttgttttgtcatgatttctgttcttttacatttgctgaggagtgctttacttccaactatgtggtcaattttggaataagtgtgatatggtgctgagaagaatgtgtattctgttgatttggggtggagagttctatagatgtctattaggtctgtttggtgcagagctgagttcaactcctggatatccttgttaactttctgtctcattgatctgtctagtgttgacagcagggtgttaaagtctcccattattactgtgtgggggtctaagtctctttgtaggtccctaaggacttgctttatgaatctgggtgctcctgtattgggtgcatatatatttaggatagttacctcttcttgtggaattgatccctttaccattatgtaatgaccttctttgtctcttttgaactttgttggtttaaagtctgttttatcagagactaggattgcaacccctgcttttttgtttgtttgtttgtttgttttccatttgcttggtagatcttcctccatcccattattttgagcctatttgtgtctctgcatgtgagatgggtctcctgatgtgtcttgactcttcatccaatttaccagtctgtcttttaattggggcatttagccaatttacatttaaggttaatattgttatgtgtgaatttgatcctgtcattatgatgttagctggatattttgcccattagttgatgcagtttcttcctagcctggatggtctttacaatttagcatgtttttgcagtggctggtaccagttgttcctttccatgtttagtgcttccttcaggagctgttgtaaggcaggcccggtagtgacaaaatctctcagcatttgcttctccgtaaaggattttatttctccttcacttatgaagcttagtttggcaggatatgaaattctgggttgaaaattcttttctttaagaatgttgaatattgggccttactctcttctagcctttacagtttctgccaagagatcagctgttagtctgatgggcttccctttgtgggtaacctgacctttctctggctgcccttaacattttttccttcatttcaaccttggtgaatctgacagttatgtgttttggagttgctcttctcaaggagtatctttgtggcgttctctgtatttcctgaatttgaatgttggcctgccttgctaggttggggaagttctcctgggtaacatcctgaagagtgttttccaacttggttccattctccctgtcactttcaggtataccaatcagacacagagttggtcttttcacatagtcccatatttcttggaggctttgttcatttctttttactcttttttctctaaacttctcgcttcatttcattcatttgatcttcaatcactgataccctttcttccacttgatcgaatcggctactgaagcttgtgcatgtgtcacgtagttctcttgccatggttttcagctccatcgggtcatttaaggtcttctttatactgtttattctagttagccattcgtctaatcttttttcaaggtttttagcttcctcgcaatgggttcgaatatcctcctttagctcggagaagtttgttattaccgatctcctgaagcctacttctgtcaacttgtcagagtcattctttgtccagctttgttctcttgctggtgaggagctgcgatcctttggaggagaagaggtgctctggtttttagaattttcagcttttctgctctgttttttccccatctttgtggttttatctacctttggtctttgatgatggtgacctacagatggggttttggtgtggatgtcctttttgttgatgttgctcctattccgttctgtttgttggttttccttctaacactcaggacgctcagctgcaggtctgttagagtttgctggtggtccactccagaccctgtttgcctgggtatcaccagcagaggctgcagatcagcaaatattgcagaacagcaaacgttgctgcctgatccttcctctggaagcttcatctcagaggggcacccggctgtatgaggtgtcagtcagcccctactgggaggtgtctcccagttaggctacttgggggtcagggacccacttgaagaggcagtctgtctgttctcagatctcaaactccatgctgagagaaccactgctctcttcatagctcaattggaaaggcagaaatcacccgtcttctgtgtcactcatgctgggagctgtagactggagctgttcctatgtgaccatcttggaacaaaatggaagaacattccatgctcatggataggaagaatcaatatcatgaaaatggccatactgcccaaggtaatttatagattcaatgccatccccatcaagctacaaatgactttcttcacagaattggaaaaaactactttaaagttcatatggaaccaaaaaagagcccacattgccaagacaatcctaaccaaaaagaacaaagctagaggcatcacgctacctgacttcaaactttactacaaggctacagtaaccaaaacagcatggtactggtaccaaaacagagatatacaccaatggaacagaacagagccctcagaaataataccatacatccgtaaccatctgatcttcaacaaacctgacaaaaacaagaaatggggaaaggattccctatttaataaatggtgctgggaaaactggctagccatatgtagaaagctgaaactggatcccttccttacatcttgtacaaaaattaattcaagatggattaaagacttaaatgttagacctaaaagcataaaaaccctagaagaaaacctacgcaatatcattcaggacataggcatgggcaaggacttcatgaataaaacaccaaaagcaatggcaacaaaagccaaaatagacaaatgagatctaattaaactaaagagcttctgcacagcaaaagaaactaccatcagagtgaacaggcaacctacagaatgggagaaaatttttgcaatctacccatctgacaaagggctaatatccagaatctacaaagaacttaaactaatttacaagaaaaaaacaagcaaccccatccaaaagtgggtgaaggatatgaaaaaacacttctcaaaagaagacatttatgtagccaacagacacatgaaaacatgctcatcatcactggccatcagagaaatgcaaatcaaaaccaccatgagacaccatctcacaccaattagaatgacaatcattaaaaagtcaggaaacaacaggtgctggagaggatgtggagaaatagggacacttttacactgttgtgggactgtaaactagttcaaacattgtggaagacagtgtggcgattcctcaaggatctagaactagaaatactatttgacccatcaatcccattactgggtatatacccaaaggattataaatcatgctactataaagacacatgcacacatatgtttattgcggcactattcacaatagcaaagacttggaaccaacccaaatgtccatcaatgacagactggattaagaaaacatggcacatatacactatggaatactatgcatccataaaaaaggatgagttcatgtcctttgtaggaacatggatgaagctggaaaccatcattctgagcaaactatcgcaaggacagaaaaccacacaccgcatgttctcactcataggtgggaattgaacaatgagaacagttggacacagggtggggaacttcacacccaggcctgttgtggggtgggggcctgggggagggatagcattaggagaaatacctaatgtaaatgacaaattaatgggtgcagcacaccaacatggcacatgtatacatatgtaacaaacctgcacattgtgcacatgtactctagaacttaaagtataataataataaatttcatttcaaaaaaaaaaacaaatttaggttattcttatttcagaatatgagctcactcacccacacagatgctagttcttgaattttgtttgtactaaatgaaaaacaacttattggttggttgacacatttaccccactggggcctgaattcagccccttttaggagggacagtttcagaatatgccatgaggtgtctgcggtgtagatccatgctctctgcaaataggggcagcggctctatagctgagtcctttcccagactcctttaagaaatttcaacaggctttcacagagctatgcctgctccaaaatatacattgacataataaaccacaatggatttaagtgtttaaagtcagaaatacacttttaaaaataagtacttcagttggccagtggagcagtaatacctggatgctaaattgaatttgtttagaataaaccacagagtaaactttaaaaaaaatgaaaataaaaaaattttgatttgtcaattaaaatatacatttataaagaaaaaataataaaacactttccacatcatagtttatctatagaaaatgtgtcaccttccacaatggttgaactagtttacagtccgacaaatattgtaaaagtgttcctatttctccacatcctctccagcacctgttgtttcctgactttttaatgattgccattctaactggtgtgagatggtatctcattgtggttttgatttgcatttctctgatggccagtgatggtgagcattttttcatgtgttttttggctgcataagtgtcttcctttgagaagtgtctgttcatgtccttcgcccactttttgatggggttgtttgtttttttcttgggtaatgtacccaaaggactataaatcatgctgctataaagacacatgcacacgtatgtttattgcggcactattcacaatagcaaagacttggaaccaacccaaatgtccaacagtgatagactggattaagaaaatgtggcacatatacaccatggaatactatgcagccataaaaaatgatgagttaatgtcctttgtagggacatggatgaaattggaaatcatcattctcagtaaactatcgcaaggacaaaaaaccaaacaccacatgttctcactcataggtgggaattgaacaatgagaacacatggacacaggaaggggaacatcacactctggggactgttgtggggtgggcgggggggggaggaatagcattaggagatatacctaatgctaaatgacgagttaatgggtgcagcacaccagcatggcacatgtatacatatgtaactaacctgcacattgtgcacatgtaccctaaaacttaaagtataataataataaaatttaaaaaaaaagaaaatgtgtcaccttaaaattgtatacttttgttgaaaatggatattgaataatgtcaaacatgaaaatgcagcagaccactcagaagtattcactagaggaaaagataaaaaaaaaaagagagtctgacataggaaccacactgtgcttgagccccacaaagcttccacattccaagtcttctgggctgtaaacatggcgtttatttgctgtgcacctcagtttcctcatctgtggaatggacatgacaataaacctcacaggtttgttgtgaagcataagtgtattaatatgtgtaaagtactcagaaatgaagtagtcaatcattgttagcctctagtatattgtttctgttgtattcttgaatctcagatgtcagagacttaaaaaaaattttcaaaagaaaagataatgataatgcaacctgatttctattttgcttctaccacttaaataataaatgataagtgttagtgcaaagagtggttgtcagtcttgctaagaattaaatataattgccaaaagaggaatgatttaatcataaaatgaagtgatttgaaggtattactaaagcaaaattagttcttgtctctttgtctctgatagacaaaagccagagaacctttctagtttttctcttgaaatggtgttcacaaacttacagtaggatggtttttctttaatttgcactttaattcagtggaactttattagactgaaattaagcaaatcccagagaggcctggaaacataaatggttttgaaatgttatggattctaaattgggcattttgaaagacaaaggtgaaggctaatagtttacatttagtacgaaactctggcattccaatggaaattggaatcaaataatgggatttgttttttaggtaataatataatgagttagctgaaagagctaacttgtaatagatttattaagccataaagtttcatttctttgaacaacatattgtcaaaatcttcacagacaacttcacttataagaaaattaaatgaaagaactatttctttaaaagttagctgtggattttctctatttggggaggggttgaaaatgccgcgtcaatggatctggctgtgatccgacctcttaatcctgttttaattatgggttctttgctacttctgattttatagttatatgtgactgacattcagacattcatagtaattttttaaatatgtaattttacataagagtcccttcaatgtgaccttaagatgggagtctctagatataattatagagaggaaggaaccgacctagaatgagttgatcatttccaggagtatctcattgtcagatttttcagttgaacactgtggcagtttcacatttctacaagcttgagaggaatgcagaagggagacccacaaagatgctcatgtggacagcacttgtctgttcccactgctgtatatttgaaaacactggggaccaaatatgattaaccacatacttctccctggagacctgaaccctaaatatgcctttttccaccatactctgtgtttcttgagaccagtatgcttgcggctaggtgtcatttatcaaatatgacatgaatgtttgttgtgcataatcatttttgtttaggtttaaaaatttaatggcagtgagttatactacctgaagatgcaggctgaaagcatgagttttgacaaagtgaaatttcatttgatgatatccattataaatcgtttttctctaactttaaagtaacatctcatttttactgtgtcttattaacaaactttaccaatagtgttgtttccatagtaaatgatatgttttaaattatatatgccccatattttcctgaaattttaagacgtttctacactaaactctgttccttcatctgtaaagtgaagatgttaagactccattatctctaagatctcttctgatacccagggcaccctaagtctaatgtccagccttttttattatggagaatatcttagtaaatttccaaaggcttgcgaggtgtttcagattgcatcgctctgacttgccaaacgatcctctctattgaccattaccgaatagtattccctgaaacctcttcccctgctccatggatgtgactgtggctccttgtggagagctaaacccagcctttgcctgccaggagccgattacagctgtgagaggtccagtcatcctgtcctactgattgcatctgtgtctggtcatctgagagagtgaaatattaatctgctttcttctcttcactcttttcatgtgtattcccctaacagaaaggagaacctgactgctgtgcactctctctggagacaagcgagcagctcacctttgagatccccctgaatgattcaggttctgctggcctcggggtgagcttaaaagggaacaaatccagagaaactggaacagacttggggatttttatcaaatccatcattcatggaggcgctgcttttaaggtgggtaggaatgacatttgtacatcctttgagaaggcacttggagatgtgactgttgtacttagagactgaatggagaaagtgtctgaagacttgaggccactgagactttcccgccagatacaaaaaatatatgtgtgaacagatctgggaaataactggctgctgtttttgtaccttaactggttatttttacttcttagagttacctctaaaaacccaacatgattcacattcttttttgcatactttttattactgcaataggattcctctggatttgtaaactgacaagagttgagcctaaaagtacacgatcagaaaaacaaaactaaaaacaagtaaacataaaggcagcaaataagacagttgtgcttgcaagaatgaaagctcagtggagcctgagagtgattgtagtataaattaaaggccatttatcacattttatacacttgaagaaaaccatggtgcccagaatgcatatttccttttgtatacttagagaagcttagttttctaggtttccagaaaaagaaggaagatcatgcttcagtcctttcacgttgaggtgagtatagtgtactggttagctagatggccggtgttcaagtccagctcagtccttgctagctgtatggaaatgtaggcaagggtcttgaccagctgtctcccatttcctcaccggtagaatggtgataataaataataactacttcataggtttccaggattaaatcacacaatgtgatgaaaacaataaagtgatgatagaggaaggatacacgtttgcacctcttgccaccctcattattatctcacaccgtgcaaggagacttcttgagtttgaattctgccttacctactctctccctgtgcatgtaggtaagctgctcagccttgacatgcctcagtttcctcatttgtgaaattagcagtgcctggttcctcatgctgctgttaagactaaaagagacaatatgtgtcaagtgcttagcacagtgcctgtcaccagctgctgataaatgttagccatctgaaaataatcgtgatatgaataatgtctatcctctcccacagcaaagccaagaaggccccgttacactcaacagagcacccctgcacctagaattctggctttgttgaagcaactgtcgtctcacacttacccttccacttttgtttcagactagatgtggagataatgcctttttcactgggaaataaatgtactttggacagacacctcttcagtttactccttggtttagttagcttttgtcgcataataaatagtcataatttttcagtaatatacacatcaataagcctttatttttctcatagctctgtgtgggggagctggggtttgggtaggattctgattcaggctggtgtctcttgatcccactgtaactctgcagatctgagtgtgctgcacttctttctcctgctccttggatcagcaggctagctggcgcatgtccctctcatgcctcgagctgtcagagggccagcggcagtgggtgaatccgcgggctccaagctagcacactgtcaccccacacataggccactggtcaaagcaagtcatatggctgagtccaaggttgagcagtagaaaacacactccagccacgatgaagttatggcaaagatgtagatacagagaagggtaaagaattgagtcccatcactccatctataaaactggctcagaaatacataagcaggagcaaaagcgaaatagtagtaatagcaacaacaacaatagcaatgaacatttattgtgcttagtatatgctggacactaggataggtgttttatatgggttatctaactttattcacatttacattggattattttcagtccattttatcaaagtggaaattacagattagaccctttagtgcctttcctgtggtcagatagccaggaattactttaagatttgaatccaggcagtctgactccagaacctgcgttatgctgcactgaaatgaagctcttccatatgatccattcatgttcctagagagcagggcctgttcgcctggaggtgtcttgtatggtgctatcatccttagccaagccatctaggtttgaggatgagttcttggtcatgtttgtggataccagcttgaaattagtcttcttattcctaatgacagctctatttgtagaatttactccaagtaaaattgaaactgagatgacttttcggaaattaaaagcaaacatcttagcttttttatgggcaataacttaagctcaagcagatattggcgagcaggtttaatatgtatatccatgtttgtgtaagtgagcatctccttacctaagcagtttctaacagtcctgtttcttgcagaaagatttcactttccatttatgtaaatttctttcctgacactggtctgctgagtcagacaatcacaccattaaaaaccactggacagcatatttatagctgatcttaaacagtaagaggcatcagtcatgaacttagccttcttgtgaatgtttagtatccatttgtcttgtttaccttttgcagtgtaaagggtagaggcctgagatttgttcacaaaaaatctgattaaccaggggaaaaaaaagtatttttccattctcctactgttgttccagtaatccactgttacgcctcggaaaattgccacccattctatgattcaggattctgtcttaggaaaattgttttgagactttgttcctgtccctgttgagaggatacacatgtaacagactacagtgtctctggggcagaggagagatcagcactgggaacatctttgtctcagcatttggccctaggtttttacccggaatcaacaaaataatctttcaaccagagcacaatctttttctcctcgcccttcataccactaattagttctcaaggtgtttttccctttagggaaggtggattttttgaaaactaaactactttgaaagatatgaccaaattcttcctgtgcattctgtgtgctggattctcctgggggcttccattggtctaaacaaagataggctacttcttgccagatgtaaaacccctgaatacctcgactctaattgagggcattgctttgttttgttttgttttattttgttttccttaattctcagtctactgctttctgtcatgtcatctcttgtttgaattatttctaatagaggatgtaaatctctatttggaaacaagagcagccagctactctaggacgccctcttggaagtgagtccctgactcattctaaaaaccaacagaacaataattctaccctgctcagaattatccaaatgcttaatctcaacttgatatttaacttcaagtctgtacattaagaaataaagcccagaaactcttctgtgcatgcatcaggctgcaccacttttgattacaggctgttttgtcatacggagctcttcataggcccctctgaagcataacttgtagctatgcctcttagtgtactatatggccattgaccataacagcggaatattgcttcttagagtattgatgccaatgtgcctaagcactagcatgcattacatgtttgtggtttcatttagttactgtctttcttcctgggcgtttgcccctgacatacagtgtagttgcttctagaactaaaatatactaaatacaagcatatatgtcaactgcttctgaaagaattatgagcagaatgaagttacgacatccatgagaatgattttctaaaatgttgcttttgtggttggaatttatgtggtagtgctgttgctgttcaataaaaagaagtatcagctctgttgcagttagaaaaaatacctttccctaaatccacatcaaaatgtccctaaatccacatcaaaatttgcgttttattttgtccaggaaagcacaaatgaagtctaaatgatccgtctgaagatgttagatatttttatgttcatttgctaaacattttaaattcattttgagatcagtggtttttctttgctttgcttttcatgtaccatattaactgaaaatttttagtaaaaatttttacatctatggactacacttccttaagttgcttgttttgctaccctaaagaattactttaaaaatgtatacataactagaatagtgctttctttaaagttaggtaagatattgtaagaacacactgtagtgagaataaaagtcccatgaagtctgttgtaccagttctgaatggtgtttttgacttcactatgctgactttgggagtggtatgtctcctactgaaactttgacctagtaaggtaagaattcaaatttacaggaatttttgctaaaggaagaatgtcgtatatcaggtagattgtttaggggctgctaaatagagagaatacatttaagactatcagttattctctagagaattaattagccaggtttgtgcttaataaattctcttgatgatgaagaaattaagtgaaagaaaaatgcctgacatggctaattgtaaatgtatgcactcagaatatgaaatagacataattgaagtaatttgattcttgtgtgcttaggaaatttgggattctccttctgaaggatgcaggatttcataatctgcactgtttagtaatgggcaaaagaaagaatttggaccaatacaagcaatcatgatatttttaaatgactaaactctaaatttttggagagaaaatgcacatctctagaatatccagaaacatggcgcttgatcctgaatctccatgtctcattgtcatgtgagacatttaacagcatccaaactacttaactccagtaggagctcccagcgtgactaatttccacccccatctctgccggtatctataaatcatgtgatagatctataattaatgaattcaaaggaagataaaagggacagctttttaaggaaaactaatgttaaatgatttcttcaactggccatttttcttaaaatttataatgttttctactggtgggagaaccttgaggatccttactggtagtcagtgacttctaagctgttacctctggcaaaaggaccagataatgtgagaatgtcaaaatgctattgaaactcctcaaatgtaagaagccaaacactaacattttatttctaaccacaaagatgtgatacattttaaggactttaaaagcaggaactttgcctggaaatatacataaattcataatcactatatatccaataagaatttgaccttaaaaaaggaagttattaatttaagcctaggaaaaatacattttagctaattttccgttttaaaaaaatctgaaaatgttagcatatgttaattcacatagtcaggcttatttatgaattttctaccataggaactattaaaatgtaatataacattacttttaaaatctcaaagtagctggcacagtaatgggcacctgtattttcaactaagcaggaggatcacttgagctcaggagttccagactgtaatgcagtataatcgtgcctgtgaatagtcactgtgctctaggcctgggcaacacagcgagaccccatctctttttttaaaaaatcccataattccagcatctatcattgttttttcttgctgatctttatcacttttgcatttttatttcatgaatggaaatgcaaacaggaaataaatttacatgtacactatactgaataaaattttggaatgctacaacattttgatgtgtattttggactccgtgattgtctcagtgggcttgaaaaaatttaagggttgatattcctaatgaaaaaggaaattataatctacaaaagttgatatagcatggtaatgatgctttggctctgaaaatagtaactttcccctgaaaagctatattcgtcttcattatgggtacctataggccatatatatgtatacacacacacacacacacacacacacgtaagaccagtcactaggaaaatggacacaaaccagaatgctcaaataaaactctgaccacagtatgaactctgcatacatatacacacgtttttgttctagcattctggttgtacccatttttatagtgactggttttaagcaatctcagtataagcaagtgccaagtgcataaaaaccaccaccaagaagtaaatcaataagataagtatgttgaaatggcttccgaaattctaacctagttaggcattcatgcaaattattcttaattcatatataacatatatgctttaacaagcttctttttaatctggttttctaggccaaagtaaattaagagcagaaaatcaggaaggagataggaaaggatggagaagaaactggaatgacaggaaagaaaaaagtgtaaaacaagcacagaatgttattattgtatggtacaccagagaatatttctgatggtttgaagtcagtatttctcaaactttcttgcagaagaaattataagattcaatgtggccatagtaaaggccataagttgcagtatatctgtttatgccccatatttttccagaatgattttaaaatgaaaagatttataatacattttgaaagcattatttcagaatggtttatgcatatgttaactcctatagtcaggcttattacaataagcctgaccaacatggtgaaaccccatctctgctaaaaatacaaaaactagccaggcatgatggtacgcacctgtaatcccagctacttgggaggctgaggcaggagaattgcttgaaccagggaggcggaggttgcaatgagccgagatcataccactgcactccagccggagcaacaagagggagagactctgtctcaaaaataaataaataaataaataaataaataaataaataaataaataaataaaagcttcatatgcccacaggtgatttgctgctgggacttcattggtttgttacatagaaatggagtgaggttcttaagacaataactgaattacataaatttaaattttacaatttctgaacaagtagagataggggcagtatacagaacgtaatcaaactttttttttcttttttggaattctgaaggttctctgaatatgccctggcatattcaagacagcttaggttcgtgactctctcatagttacaatttgtagatgaaacttaacaccaggaccaaaacacctgactgacttaatttagcaagcacttcttgaacatttagagtgagttagacaacagtgtatagtggactagacaccgcatacttaaaattacccattctataatctaggaaggtagtaacacaatacattaaatatataaaaaacactaatatgataagagctatgataggcaaatgtgagaagtatcgtgggtgttgagatgatgaagcatttaattctgtctggggagaaaactatgaaaggaaggcaattgcaaggcttgcttggggtgaggagtaagtagactttgaagaggtgagcaggaatgcaaagggcattttgggtagaagaaagaatatgggcaaagtcaccaaggtatgtacaccaaagtacagtctgttgtgcctggaaaatagaggtcttatttgggaagaatggacctcttcacataagctgaaatgatgtgaaacatgtagtagcttttttgttttaacaactgtactttaaaaatcttgattcattcttgcccttccattgcaattgtttttaaatgaaggtaaatgatttcaatctggaatacaaggttcttttcttagtttagggttttgggttttttggggggtttgatttgttttttcaaaaaatgcagtagacagatgttgtcatagagtgattgtagggccatgagaaggattcgttgaagataattctctccctgaatcaggtgccatcttgcctggggtccagccctattccagggaacatctgctctgcaacctgaagtcaagctttggggtttgggacctgggagttgataatatcccaggaggccgtaccaagggccccgttagaagcatgcagaggcagaagccaacatctggtcatgattaatcctctcaacaccctggactaatgtggactggccttgggccacagccagctacccctgggaaagccagcccactttctcatgcttctctcatattcttcagtggctagttcagttctttgccttggctttcttacttttcctctgtattcattagaattttagaggtaacagggcagttgaggggagggtttaacaaaaaatttgccaagccaggtggattaagccacacaacattgccagtaatcatggcagaggaagtacccaggcaccagtgaatataccacaggggatgaactacaaggtcattgcaccccccagcaatcataaataagctttagaggacacatggagtagcctacagcatacataacgacccctcactccaaagaattatctggcccaaatgtacaattgtggaaagaccctggtgtaaatattttttttttcaaaaatgagtatctgtagcttttattagattctcaaaggagtctaagaacccataaaggctaaaaatcactagcagattgtttgaaaacatgggctgcagagtgacccagacctagttcacatctgcttttagaaacatgacttgtaacaattcatttaacctctctgactgcaatttcttcttttataaaatgggggcagcaatctcaaatatacagggtttctataaggagtaaattgtctgctacatgtaaagggtttagcatgatgcacagagtagaaactctttgtcattaatatagtgcctttaataatctctaaaagtctgaatgtagaagcaacgtagcataaaggattcatgtcattaacctgagagatgaggagacctggctatgaccataccctttgacaagtcacttaatttctctgagccttcatctttacatctcctaaatagcagagagtagcatttatatcacagggttgctgtaagaaatgaatgggcaaatatatgcaaaagacatgctcaaggactagcctacattaggtgttcagtaaaagggagatgtcatactcaaaggtcttgtctcctggtcctctgtgcgtcctactgtgataggaccagctaaagctgatgagattgaaaccatgccaggacatggagaagacctaacctcataccaggttttttcgttctaaagtgcactgaagaagttacattttgtctttactctgtcctcctgattctttttaatatgttttccttccctttgggaatttcctttactcctttctagcttgaggatggagttggttatggggggatgccagaagcggggaacataattgaagtatttttgcttaggagtctgatgggagtaatagaggaagaaaaaggggtgagaaagggagagagagagagagagagagagagagagagagtgtgtgtgtgtgaatattgcaagcataacccaggtgaaataaatatcctagaattaccaagcaacatccttgaatatttgaattcatttatgtaaagtcaattgaaagttaatattctcatgcctaaatatttactagaatttaatattaattttaaaaaccataaaaagctgattgtctttgtccaaattattccaaagcaaatgggacatacacaattttgagagagatttgatgagtttttgaataatgagctcctcattgaatcaacttcattttaggtcaagactggacatagacgtgcatgtatggatgtctagctaagtaggtagacagccttttttttttttttttccctcctctgggttgctctgccatgcccctgcacagtttcctgtctccatatcttctgttgtgtgtcttgattttatattgtcttcccttccaggagatatctggtagcatattgtcctctctggttctgaaagtcttttttttcttgaagcattacccctttaggggcttgtcattgtcatctatgtagaatatagaatggtttggtgaatagggacgctgtggaattcagaacttgggctgttctgttccaattctgaccttaactagctgaacaagtctaatatctgtggaagtgccttttcctaataggtgttcgataaatggtttctcatcctctttgggcatcccattattcatctgtaaacggaagaggttggatgagatgacctctaaggacccttccagctctaaattcagtgattatattctaaatgttaggacaacatggtgcttactggcatcgccattaatgaaattacacatcatttatcttataaagaaaaagcacacaccaataacaacagaccagccaagcctgacagtgagagtgtgtggatttttattgcacccacaactctctggtgatgcttgtgatgaatgtgaatgtctttgaaaaaaaatttcagctgccctgaggtgacctgaactgtctttttgtttgggacttggttacaggaaacatgccctacttcagtgtcattctgcatgcttgagatttagaatgtaactgaaaataaaaaaataaaaaataaaaagtttgtgcttagtaactgttgatagattttaccaaaagttctcctatcttcttgtctgttatctacctcttcactctgacgttgtctcatacttcacagaaaaggttcacaagagattaccaggtgggatctcactcatatttccttccctccatctctagaggttcccataaagcttccatctttatcttgtttcttcctgtcgtagcagatgaggtgtcctgccaagacaaagcactgcaaaatctcaacatttcctgttaacctcatttcctgttaacaggactaggaccaggaactggattcaactcttctgcttcctcctcctctttaaaaaccacacatcagtctccagtcatcctaaaacgatttttagtaacaagattcagcccaatggttctcctttcttatatgacaatagagcagaaatatttctccagttatatctcacatcacataacgaaaccattcagggtgtttttgttgttccccccaccctttttttttttttttggagatggagtttcgctattgttgcccaggttggagtgcagtggcgccatcttgcctcactgcaacctccgcctcctcggttcaagcgattctcctgcctcagcctcccgagtagctgggattacaggcatgcaccaccgcgcccagctaattttgtattttaagtagagacggggtttctccatgttggtcagactggtctcgaactcctgacctcaggggatccgcccacctcggcctcccagagtgctggggttacaggtgtgagccaccgtgcccagcccgtcatatcccatttcatgtagccttatgcttttttgtgcctcactcaaaattggataacagaaatgaagagatttctttcttgtttggcctttcctgtaaatctcatttccagacttgcttcaaattagggtaaaggttaagtgaaatgggaaaacaagaggaaggcaggggacattaagctctgaggaggcggtccacttaaacggtttacatctctgacttgacgcctttgtctattgatcccattaccctgccatctccatttcttccccgagtgggtgtgtcctcctatgggcggcccctgcaatcccacgtggctaacaccctctccagcaggcggcgtgggcagtgtgtcttcaccagggcattggctctggggaacagcagctctcaccatgccctcccttttctccactatcagcagagggacttcctcgggccatctgctactgcattagtccgagtttaacgacccgtctgcacagtttccctcccaaagctgtctggttggtttctattgttcattgtgtgtgtctggctatctcatttcttttttttttcttttactttttttttcttttacatttcattctgttaatttgaccacaaatcccagatacttctcaccactagaactctttaatattttcctttccctatttttgtgttgtgcagttgtagtctagagacaagaaacaaagggaattgtcgtggaagaactaaagagtcaagattcatgggaacctttgactcactttcgtggcctggaacaagttacattttgtgcctcagtttccttttctgtaaaatgtttctgaaaatataaatcttaaattcttaggttctgtgagaatcactagaggtaatttatggaagaattctctgtaagggtaaactgttacacacctgctgttaattctgttgactttattagcagcagcagcagcagcagcatgataacattcgtaatcacagctgtgctttatagcaagcactttctacctgagtgtagaataggtagagagcatatcccctgagtctggctgtcaacatttcaagcatctttgctcctgggctgcctttggggaaatgcactgtggtcccttcaagttctgttctaggcagagcaggcatcccagtgtgtcagccactgatctaggcctctgcttatgagggacttctggctggagatggtcagtgcctcattcactcaaaagtgaatgagaccacagtctgggctgtgtattcatatgccgaggttctttgtgctttgtagtaagtggtatttcttcctgaagatgctggttgaaagtactcattcatcagagcctctttgaaaaaaccttgacaattctttttgtcaagcttttccaccagaaaatatcagggcgaactggcccttttctacacacctctgtgttctttggcagacgagcaactttgtggttgtgttagacaaaattatgtggttgtttttttttagtactgttcagtagagctagcaatgatatcaggagatacattactactgtcaagcacacagcatttatgcatgatgcctctttgtgcctgaaaaggcaaattctcctttcaagagttgtgactacctcctttggtttccaaacccccttcccttgagtcaacaacatggtctccgccagagcaaatggcagaatcaggtcagattagcatgcttgccaaagatttaggtaagaggcattatacaaatgtctaaattattgcagctcaggactctaagatttctaaaaaatactttcacacaattcattatcactggtatttgtgactatttgataagctccagagcctttttctgccatggaaaataaatcacttctaacagctaggttttctttttttctttttttcatttttaaacttgaacttttccccaaaacgccacatgtcatcaccatacttttctctgttgaatattgttttcctttcttctgccttaggatggtcgtctgcgaatgaatgaccagctgattgcagttaatggggaatctcttttgggaaagtccaaccacgaagctatggaaacacttaggcggtcaatgtccatggagggaaacatccgagggatgatccagttggtgattctgaggaggccagagagaccaatggaggtgatgcaaatcttgattctcctcagccagttgcccaaattgccaccagaatatgcagacttccattcctagtatggcagctagattcatatcgagaaaatatgccccagaagggctttgatgggaaacaggtggttgtgtattttaggtataatagaaaggtgtaaaaatgtgcatataaagtaagtcatttatcagatgtaacaggtctataatttctagttttttcccccagaaattccaagagctctgaacttgttcataaacatctttatatacttttttggttgatatgctagcagtgtccataccttagaaagtgtctaatcacatgtgtacaatgtttaatgtggagatcattgtaatgcagtcagctctctgtattctcttccataatctgcatataaataatgcagacctgagacttaactaatttaacatttgatttattaaacaagctgcttgctcatgttattaaataaatgggagtcttgttttttgaaatcttttattattttttataagttttttaaaatatcaagaatattttcacttacacatggagtctaagtgtatgatagctttaataataatattcctaacattatacatataaacataaaaatacctaaaacattattttctcttatatgaagaataattattaaatgctcataaaataattttagaaaaagctaagaagaaaaagttaatagtactgaaagtttagaaaaacatcagcaaatcacacattttgtcatatcaggatattctctaaggccaaattgtgtttgtgtaataaaataatatacaaaatttaaaaaactatttaaaaagctaatataaagtactagttttaataaagagttcagcgtaataattgaaaaatgaaagctttatcaagttaatcaagagttaatggtagtggggctcattgtagttaaaagcttcagctctggagtttcgaattgcttgggtttcaatcctagatttgctatttcctggctatgtaagtacatacataatttagtgcttggtattcatagatgacagatattgctgtctgttttatcccttaatgtgtccttggtttccgcatgtagtagatgcttgataaatattgagtgaatgaaaatgtcacatctgagacttacttcatctcagagagtaaacttgagtagtaaagttatatactctatcttactttattctattatcagctacgggcaaggagtagctataccttttatgctctcctttatataagctcgcagatgttaaataaatttaaattggccaattactggagactaaatataatgaacttattttcaacatttgtgtctgcttaagtgacagtgttccataaatatttaatgggctttacttatgtacctagttataacacccttatctgccacttcctgccctgagagaattggccccatctggtttaggatagttcttactctagagccctaggactccatggaacccgtttattggagagagttgaaaggatggactgcgaacgcctgagtcatcccttctgtgcatctgcatatcagatctcccttaagactttttaaacaaagatacctcaactaatagaagagtctagaaaaaactgctgtagcataacatacctgtgcagatagcaaaagttaaaaaagaaatgactatggttctaaaagagttagtagatgacagcagataggcgttatatattttggctcatcgagttggcacactttactatttgcattcccctttactgcaggtattttcattttaattctcacactctgggtagattggcgttattccatcagaagaaagtatgaaactctcatttgttgcccgccatcagaagtgccatgttaatgtagatcaccagggaattgatcaagaataagaactgggtcaaaaagcaatttctatgaggacgtttaaacaagatccatttttagtttccctaatatttacatgctttccatggggaatgagcaggcacttgactctcggctactgagcatctctgcggtacccatgaagattaaagagcattgtttcttataaagacagaagactaatgtacagtttatctttattaaattgaaaaaaattgcaactgtttgatcttcaaatctgtgtttcactgtgtcagagcatattttgtgtgctcatgtttttgctgtattctctggtggaacagcacttgccctccagtacaataaaaagtatccataacctagaaaaaggtctcagcactgttgatacattcaggcaaatcaattagttagatttgccaggaataccaaaatggttgcttgaacattatattgatatctcaaaaattgaagaagctacttaagaaaagtcaaaatatatagttgttgggatttttcccgcattacccagatgtacaagatatgtaaacagttttgatgaggaccttgtgaagaatacataatgagcccttgattgaatcaaaattgttttaaacagaaacatatttttcaaaggatgagcttgaggttcaattgtaattctatttgagcctagagacttggtattaaaaaatgggttatgacctgattttgtttttcctttccccaaaacatttccctccctgctgccagctcatcgtggcaaaagcagaatatgtttaaaaatccattatattttttattggctgggacactaatggagggctctgcgacggctctattttacaggctgaatactttaattaggctggttactgatcagttgttgggatatcgattgtgtcatttatcaaagagctggggaagcagaaaaaaattttttgttcttgttgttattgttaaatcaaagcacaaggctgagcaaagcaagccctagctctctttcctgctgcagctccagctttaatttaggactagcttacctcctataccaggctcagtttgactagcagttcagaagaaagggtaatacactgggtgtgggaaaagtgttacaagccttgacaaaaagctaaaggaccttcagcagctgaaaacattttaattattaagaatgcataaatggaatgttttagatattttgtgtgactagctcaacactgaatttttataaccaaagaggaaaatataaatccaatgctttgttttagccaaatgctatactcagaagagctctgggaatcagatgggtgctgctgtttgtggtacattcttctcacaaatggtcaagggaacagccatgagatggcttccaaatcatttacctccttaaaatctgttattgagacaaataatacgaacaagagcataccctaattctctttgctccaacctttttggaaaaaaaaatagttaagagttctctatcatcagcctcctccaataattccttcttcagcacctgtggaagatggatcgtaggggtgttactctggatacagcagttttcagaaaactgtgaatgtgtttacagactgtaaaaatcaaaataggaaggggaaatatagggggggaaccctcaggagaactgctgtctggcgtcacagcggtttgatttagctcctggccaaagacctagtatctgcacagagacacactggtggtatttcagaggcgaacctgcttgaattctgacttgtcctagagcatatgcacttaggcgcagagagagagaggaaccagctggttggcagagaaacacccttggcatgaactgtattcttgtgttgacactgccacaagctgtattccccagatggaagaaaatttgaaagaagccagttataagtgggaaaagagaataataaagttaatcctcttttgtgttggctatcagcactcctaatccttagcaccacagtgtcagtactttttattttagactcaaagatgttttcactgatagggccattttgagtttccacagttgaggacttaagtgtaatagactcttgaaagactattcatacagcgatcattctttcactttgcttcaactgaccaagttggaacatattaaaaatgcaaatgtaatttttacttttatctcttaggatcctgcagagtgtggggcattttccaagccatgctttgagaactgtcaaaatgctgtaaccacctctaggcgaaatgataatagtatcctgcatccacttggcacttgcagtccacaagacaaacagaaaggtaagagtctattcattttatccactgcaaatggagtgagaaaacacaaaagtgtctttttatctaaaaaaaaaaaaaaagagtaaaggggagttaattagactaagtgcagactttgttactcggagtcacaaacactgagagagttgggggagagctgactcagaacttgtgaatcagattcctggcaatgtctctagtttaagtgacactttctgtgcttgctgccccaaacatggagggttatatataaaacaaacgatcactggagaatcaaagatggcaaactgttatttttaagctcttctaatactggaagttaccaagtataaataaataactaccaaaatttaaaaatgtatggatttataatccataaaatggtcatagcgtgattcacagatgatcctcgattctaatatgagtatgataaatgggtgaatatcctaacctgaaaccatctcgtgatggttggaatgttcttgttattgtcttgctacactgttttgccttattatctaatgtggatcccatttctagctgactccagatgtaaaaaaatctgggttttcctctttgtcttttaaaaaatatacttcaggtcaccaagaaaattgttttatctccctgtatctcttttctttaataaaatgaattttttattacaaaaacaatacatattcattgcagaaaatttagagaaaagaaataaaaagaaaatttaattttacttatacttctatcaaagatcctaatcagtaacattttatgtatatctttcaggactttttaatgaaaatattttatacaaaaaatgaaataatgaaatgtatgtaatgtttaggaaatttctttttaaaattaatagcacattatatgcctcttagtcattgaatattcttctacaatatcacattcagtagttgcatagtgtcttttgaaggtaagtaccatatattatgtaatcagtccctatattttgaacacttaagtgttatcataatttaactatgtggaaagaagttccaagctgtgaaattactccatcataacatacttgtaaatctgaggtggctctagaattaaattatctcattagaatgggatgttgttttttccacagaattcctccattttagcaagagtagtagcaacagctgctatcatttattaagtgtttactgtctgttagatactgtgttgagcaatttgcctgcagactcaaagtggataatgttatcttcattttacaaatgaaggtctagaaagtcagtaaataatttactcacaaatgcatatttgatacatgcacagtctggattcaattcctgtctccctgtcctcagtttgtcttccaaaccacagcatgggtctgacttatattggtctattgaaactattggagtcctttcacctactgagaatgcccattagaagctgactttagaccgggcacagtggctcacgcctgtaatcccagcactttgggaggccgaggcaggcagatcacctaaggtcggaagttcgagaccagccagcccaacatggcaaaatcccatctgtactaaaaaaaaaaaaaaaaaaaaaaaaaaaaaaaaaaattagtctgatgtgatagcacatgcctgtaatcccagctactatggggggggaaaaaaaaaagaagaagctgactttacttagtatacagataaaaaaaaaatactcagtatgtcttttctcatcttaaagaaattatggtggcaggcacctgtagtcccagctactcgggaggctgaggcaggagaatggtgtaaacccaggaggcggagcttgcagtgagccaagatcgtgccactgtactctgggcgacagagcaaggagactctgtttcaaagaaaaaaaagaaattaaaaattttcttgacagaacaagattgccttctgaaatcttaaattgcagtagcaaaagagcctgggaaaggaatggcaagttttctgcaaaataaaacagtcttctttctaccttatgatcacgaatgtggacatttgtattaaaatatctagatttcatgtaacttgattggcatttaattctctagcaacgtgtggcccagtgtctgtctaagtctagagtttaattcctagttacaccagtgacatctaaatgaacactaagtaccttttgtttttaatgtctataaaatacagttatgtgccacataatgacattttggtcaacaacagaccacatatatcatggtggtcccataagattttaatggagctgaaaaattcctaatgctatactataatttttatcatcattttagagtacacttctacttattttttaaaaaaggtaactgtaaacagcctcaggcagttcctttaggaggtatccagaagaaggcattgttaccataggaaatgacagctctgtgcctgttactgcccctgaagaccttccagtgggataagatatgaagggggaagacagtaatattgatgatcctgaccctatctaggcctaggctaatgtgtgtttgtgtctcaggttttaccaaaaaagtttaaaaggttaaaagaaaaagtataatagaaaaagcttatagaataaagatataaagaaaaaatatgtttctacagctgtacaatgtgtttgtgttttaagctgttattaaaaagattcaaaaagttaaattaaaatttataaagtaacaaagttactgagattgaagaaagaaaatattttttagaaatgtagtgtagcctaagtgccttgtgtctgtaatgtctatagtagtgtacagtagtgttttaggccttcagatttactcatcctcactcactgactcacccagagcaactgccagtcctgcaagctccattcatggtaagtgtcctatgcaggtgtaccaatttttatcttttatactggattttcactgtagcttttctgtttacatacacaaataccattgtgttgtaattgcctgtagtattcagtaaatgctatacaggattgtagcctaggagcaataggctataccacagagcttaccagagtaagctaatccttctaggtttgagtaagtacactatgatgttgatgcaaggacaaaattgcctaacgaagcttttctcagaatatatcctccttaagtgacacaagatgtattttctgaagacattgagatacttaagtaaatggaataatatctctgcaaagaatagcaaaggctaaactaatgaaaccatagaagtagttaatgtgtaaggatacatccagaaaacaaaaaataagaaaatccactccaagtgcatgctaaaaaatacaatacaataatcatttggtttggaatttcaatagaatgttcagactttgtatatcttctgtacaaatagagtcctttgggcacaagtggcctcagacaaccactgggagattttgtctcttcttttcttcccaggacgtagatttagttagaacaatttttacatcagtgaaaaaaatatataaattaactatctacaagtttcctgtttctctttcttccaaagtgactccattaaacattattttttcaaaagtagagaaaatctattattatattttctttgtggatctgtgctaccatactagattataaaatttaggcctatcaaaacacagacttattacattttcattgttagaggccagtagatgaaattttcttactttttatgtaagtctattgatttagagaccaaaaaattatagcagaatatataaacatgatgctataaaagagtatcatggccatcacgtctttgtaatattaatggcattttatatttagggaactattgggagttcctgagtttcagatccatgtcaggtggtaacaggccactaaggcttataaaacctgaatgttgattgccactaccagtttttttaaggatcttctttagaaaaacaagattaacttgacaaaatgtaatgtctagtgaggagaggagctgttacagccaaaacattggcttttttttttttctttcctttttcctttcctttgtatatttaagaatccaatgttgatattctgtgttccatttatttttgtaataatagtacataccacccacagttcttggtttttattttttttattcctgtcaagctgttacacagaaaaaaggcatttttagaactaatgtttatagaaatcgtaataccagaaaattcacatttgtactgaagaattgctagcaatgccggtagtgaaataagtgtggtgcttcaagatggtaatagggatggaggctgtgtcccaggggcttcctataaaatcctgttaagcatttgaatggtaatgaaatgcaccaacactgtattttctgaggaatcttgctggcagatcttaccctgggccgaggaatagcctcatgcagtttgcctctggttagcattacctctcatttcactgcacttgtctcccctatatagctcttttcctgcttctcctttttcagctcaagtgcactcctgtcttaggcacccactgcccccaaatctgcccagcatcacccactgggttaggcctttcatctccatctcaaatcaaatgtggtggttctgtgacctgtctctctggatccgtattccctggggtcctctgagacacatcatagtagaattatttctaatgtgtatctttctggggaccagcatgtatctacccctctatagcatgtaaagcactacgtctggaatgactatccaagattgaattatacgtttcaatttggctaatgtttattggatacctccattgtgcagaatacactatcaggagtggtgaatgcagtagtattattgtccttaagaatagtctgaagcaggagtcaaaaaactttgtccttaaagtgcaagatagtaaatatttcaggttttggactgtaggtctctgtcatcactcaattctgccatcgtagagcagaagcactcatggacaatacataaacaaataggcatggctattcagtaaaactttatttgcaaaggcaggtggcaagctggttttggaccagggccatagcttgctgacctgttgtctaaagttacaatctcttttactcattcttttctgatgtggccttggtaggatagatcccacaacacaaataacaacaaaagatgataattaaaaagaagagccatttggccatcaatgaagtaatgactacagggagtgctgtgtcaacatttacaggcatagatatatacgaaatgaccatcaagaagactgtacctcgtacactcaatgaaatccagaaatattattataggagataagagttccagacttttacactgaaacaagggcttaacaaaggtgtctgggcccagaagaaaataaaaattccttacagcatctgaatatgttgtttaaaaaatgtaacaaggggccgggtgtggtggcttacgcctgtaatcccagcactttgggaggccaaggcaggcagatcacgaggtcaggagatcaagatcatcctggctaacacagtgaaatcccttctctacttaaaatacaaaaaattagctgggcttggtggcaggtgcctgtagtcccagctacgcgggaggctgaggcaggagaatggcttgaacccgggaggcggagtttgcagtgagccaagatcgcaccactgcactccagcctgggtgacagagtgagactctgtctcaaaaaaagaaaaaaaaaaaagtaacaaggatagagagtcaacaaataagatacttacctcaacaaacaaggtacttacctctacaccgatcaccactttaaaaaaaaacactgaaaaacacataaacacataaagaacgataaatggttcacatgagtgtaataaaaattaaatttaatgattgtaataaaactagctagagaagagactgtagaagacatggaaaaacgagaaagaggaacacgaggagaaagttatctacagtctagtaaaagaaatagacatagataaatagataatagcttgatagaacaataaatacatacatagttcattgcaaaagtggcatttgataaatgctatccaagaattactttacataatattaagtaatagataaacctaaagtgtcactggatagataaagacagtgaaagtctatttcctggtcctgtcactgcacaatgaggtttggcagctgtgctccatgcagtgattacaggacctaggctccttccactggtggctgggcacctcgtcacctggctttcaggtgatgtagatggggaaaggaagagagagtgaggaagctgcaccctctcataaccactgagactgggaatgacatttatcatagcagcccacattccatttgcaagaactagtctagggacaaagaggccctagcaatggtgtccagccgtatgcccaggaagagaggaagagcacggatagagtgggcactggtcttcttggccactgttataaaagtgacagatccttggcaacagcgaaggcttcatagtaaaagtgatatttgggtggaccttgggagaagggtaggattttgacaggtagagtaggttttgcagttacataagcaaagatactgaggcaggaacacccaggggtgttggcagggaatggtaagctaacgggtaatgggagataaagttgtttgccaggatcatagacctttattccgtaggcaatgtgtgcagctgaagtgattttgagcaacaagttacatgatcacaaatacgttcaccatcactgtggaagatggactgagaggttgaggatagaagatgagagccaacagaaaggaagttgtcccaggatgtccattgtccccaatttacattacagtccttctgttctgtttctcttagcaagtcttgaatgcctgactgctgccaccactaacaaatcaatgggcccctagggttggaggtggtgcaggggcacagtgcaggcgctgcctttgtgcttctttccccctggtcacctacttagcaggtctgcttcaagcttcatccccaggggcatgtcagctgtgctacaactacctccacatcagtctagtgcctggggcagagcttggagcaagtccttgccttgtgtatttctcagggttctgcagagaaacagaaccaagttgtgtgtgtgtgtgtgtgtgtgtgtgtgtgtgtgtgtgtgtgtgaacagatttatgataaggaattggctcacatggccatggagacaggcacatcccaggatctgcaggatgagtcagcaagctggggttgcagaagagttgatggtgcagattgagtctgaaggccggagaaccagaaaagctggtggcgtggtttcagtctgaagacaaacgggcttgagactcaggaagaactgatgtttccgtttgggtctgaagatagaaaaaagccaatgtcccatgtcaaagtcactcagtcggggaattctctcttattcaggagagaggcaatcttttttgttctattcatgccttcacgtgattagacaaggcccaccccattagaggggacagtctacttatttaaatgtgaatcttgtttaaaaacaccctcacagaaactcccagaataatatctaggtaccctgtggcccagtgagattgacatataaaattaaccatcatatccagcacgtggacaagccaaagcaggttttatcaccaacagcagttctcaagggtagagatatttgtcccttattctgtcattcagggacaaatcaggtacatatcttatcaaatatgtcactgtaatagatacaagtagaacttacaatctatggaataataatcctctgtttacttaacagtatgcatttacaaatcactgcttaaatataatttagtttggcccggcgcggtggctcacgcctgtaatcccagcactttgggaggcggagatgagtggatcatgaggtcaggagatcaagaccatcctggctaacacggtgaaaccccatctctactaaaaatacaaaaaattagccaggcgtggtggcgagcgcctgtagttccagctattcgggaggctgaggcaggagaatggcgtgaacccaggaggcagagcttgcagtgagccaagatcgtgccactgcactccagcctgggtggcagagcgagactccatctcaaaaataataataataataaatatatacacacacacacacatatatatatatataaataaaatttaattctcatattcctccagtaaaggtattcttgttgccacttgatggctttaaaaactgaggcttggagaagttgagtaatttgccaagttcacacagcagtagggttggaaacatggcagtcttgctccaaaaaccatgcactttaccacgatgttatataatgcttttcatacactagggaatatggttagtaattatgagcattcaatgaaataatatacaaggcttaatataatgtctgctgtataataagatctcaacaaccttacttgttagttgtggtgatattagagatacatgtctattcttatagtacagaacaaactggaaaagtatacatttttagtagatgggaaaaccaggatttagacccctgtcttttccttataaggccttaaactcagatgtctccattatggcacagatagaaaaaaagagcgcacgtttgtgtgtttgtgtgtgtgtgtgtgtgtgtttatctccactatgtctaaatggtggacagatatactatatcgtgattttttaaaagaagtttttgctactgaagcaaatgctttaatcaccatataatccagagtattcactatagagacttgtttacaaaaatattaaggcataaaacagatgactttgttaatcttccacaaatcacaggtaatgagtatgtgtcagccttttgttggtgggaaaaggtagtcaagatctgtggagtgggtttgctaggggttgcctgcaggtcaccagtgtaaaaacatattagcaggcttagatttcctcatacaagcagtattcattctcataaggatccttcagttctgtatgagaacttatttatttcagggctggtttatgtgttggctaaaactgcgtctgagagagatactgaaaccaaaccaggcatcgaatggttctgcttccactttatacagcttcatttgttctttgtttataggtctattgctgcccaatgacggatgggccgagagtgaagttccaccttctccaacaccacattctgctctgggattgggcctcgaagattacagccacaggtattgataaaatgatgtatcgtaaatgctccttgttattgtttttctgggagaacacagcaaccttattcagcaaacttattttaactctatttctttctggaatggaaatcttatagtatctataattcctttccagcgaaagcttcagtgaaagtttctcatagctaatagcttagattgggcatattttgcttcctggtatttgttaagattcaccttaaattattaaaatatttaagaaaatggttgaactttcatttacaaatttaaaaactagagccatggagctcaaagaaaagtgacatgggaaggtataaaacaaaactgagaaaataggaagcttatgggtttttattagtaattggcaaaccctagaggtattttaaaaatagatgttccaagaaagttaatggaatctaaaaattaaagcaacaccatatataatctaaaatattgaagagggtacccaatattatatccattctgtaatagaaactaaaaaaatcaataatttttagaatcacacaagaatgagagagatttactaagcatacatactatttgacaaggggaattcatagattttgttcttctgatgagttttaaaaatcattaaattgtccctttgctattttctatatttactatggctgttagaaactgtgtattttattccattctgtgtcccatgataatcctgtgaaatttcttcatttttcttgcagcaatgctagtgtcattcctattatgttttttaatacagtctgctaaaaataaagcagcatgccttagagtatagctaactgtattaggtggaagctcacctatatttagctatctctgattcttatacttttgaagtcagttatcttgctaactacagtttcgtgaactagattgataatcataataatattctagatcaatgtctctaggggtttcataaaagaaaatgtggacctatttaattttgtccattcatttccattgcctgcctcgattctgaattgaaaatgacaatttggtggcataaaaaaagccatttaaaacataatttcatttgttctaccttactgtttatcctgtatatatgtgcaaaatgtttgggatggtgcaaagctgaatcagatataaaccctgtcttcaggaagctggtaggctgacaggtaggctcatgggacgactggaacacaagggttccaagtgatatttaccagaaggtatagataaaatgctctgagcatctgaggcagaggagaatgcctccagataaaggaatcagggaaaatactatggtaaaagtgtcatttgagctgaaccctaactcatgaatagcaggtggacatgagatgagcccaggaagaaagggcatttcgggagggaagagcagcagaagaaacagcatagagacgggagagtaaattgaattgtacaaggtggagctgatcagccagatgataaagcccagagtgcaagaataaggtatgcagacttcatttggtagatagtcaatcttattgcagggttttcgcaggtaatacacagaatgaaacctgggttttttgtgtgtgtataacatggattgggtgaatggaagaggtttgatatcccctggaagccaggactctttggataccttttagggcaactgcagtcagaggtactgagcatctgtgcaggggaggctagagagaagcactcagatgagaaaccttcaagggagagaggtggttcagagatcacctgggatttagcaactgtctttttggcttcaaagtctccacggatttctttccttcccttttctgcaaagccattcctttgtgaattggggagagaaaaaagtttatattgctcctcgctgctgtaaatcttcattacatggtatgaactagtaacttccatcttcttttcacgtcttccttcctagtcccgtgtgttttaggcctctgttctcacttctttattagaactgctctcttaatcatcaacggtaatctcctttcagtcaaaagtatgacgttgtcttagacttcattcttcttttccactctgcagtatttggttattaagtcatttattcacttactcatccattcaaaagtatttctggagctctgagccagacactgtagaaagaactcaaatggattggaaagcatccctgcctgcaagaaatgcagcgtcctcttagagacagacacgcagataattaggatgcagccagctaagcattagatacaaaatgcaatgggagcctagaggaagaagccactaactttgcctggagttgtcaagtaagttttcacaggagagcagtgtttaagcagtttcttggaaaacggaagaaagctctctagacagagaagtggcgggaagggcaatttaggttaaggaaaccagggatgggaaagaatgcagagtgtgttcagtgtggctaaagcttgtggtatctcagggaagaatcaatgggaagggcattgtctgtcctgctccatgggtgccatgcttctccggagagcagtggagaagcattgaagcgctttgagcctggagatgacagtatcaggcagagcagtttcagtgatggagggtggagggaatggcagaagccgccatagacaaggaggctgctccgacttgggactagcaagagaagagcagggcctggatggagggatcagaagcatgggtggagaagaaagggcagagatattttaaaaatggaaggaacaagtcttaagccttgaaactctcccctcctaggatcgtgtgacctgcaccatcctgcaagctgctgcgttgcctaggtgaccagcagcagcaggggttggatgtgtgaaacttgggatggaggaaggactggaagggagccaggaggattgagcaagaaaggctctcctgccttctgcctttcaaaaaaaaaaaaaaaaaaaaggaaaagccctctcaaaggaaaaaagggtgttggagggatgaggctaatcttgtaaaagagaaaactgctatggcgtgaggaaagaaaaacaaatttgatcaaacttaatgcctgtacaaaatgaaatcaggaaattgctcaacctatttttactattatgcaatgattattacagaaaagtttataatatgtgggtctaagtaataaataaatataaaggaaataaacttactgtgagatctcaggcagagttgaagctaaatcagcagcagacagaatatatcgaatattattaacagtttagacaacattgggctattccccacatgttcatattctctttctctctctctctctgtctgtttcttcatgcacatacctgaaactactctcactcatagaagccaattgttgaagtccatctgtggacacctgagacttcagacatcatggtttttgtcttgcctctcaaaatcttcatcccccaccttttcacctcagacagttcttgaacattcattgttggctcttatacatcttttacattcctggtttgtcaccatagtcaaacactggcatatgtttcatgctacccttacttattcattaggcagcataatttgacgttgagtatcgtttctatttggtagattctctggtcgttcatgctgaaaacacggcctttatctaagacatgtctttggcctgctgtcaacttccagcttccaacagccttcactgcagcccactcagccatgagcacatgctaactcccttcaaaattaaaatgttgtatttcatagttaatcattgtgtcaccctcttaatgcaaacactcgagatatgtagcgtaaagttacaaaccgttttactagtctaacttacatgtctaaaatattttcacatgaactaactcaatacggcactcactcattattctggtgctctatatgcccacattggctctaatcctatgacttatattacactcacttgcctccttaatatccatcaatctgatatcagccttatttgccttatttccattttgtaccgcagcaaagggggggcccttttatgaaacgttttcaaagtgtacacttggtcacaatcaaaatgatggtaacatatatgtgtatgtatatagatagatatgtagatatctcattatgatcaatttaaaggacataatcagatgtgtacataagagcatttgttacattcatatgtacagtgcagccttttatttctttgatccttcttgattatatgccaacatttgtataaaagttcactttattagacagatcctagcttgatgttactgcatcgagtgtcattgccaccttactttttaaacggggattgggatcattgctacctaagagtctgggaaaatttgagctcttattcctaatttgtgaattaacacctggcttaagaggataaactaagacaatgagtcaggttcaccaacacattgttcagttgggtagattctcagtctgccttgagcagagcactttaaatgcaatctgatctatgttttaatgagggtcctacacctcctccctggaggctttcactgctttgattaaggatttagttttctattattgcatgatgtgcaccattctattgaaacaaaaagcaaacctaaaatgtaagccacatagtaaaaggtgagcaagtcttcactaaaagtgaaaggcttgatttttgcggattcgggatcagcaacaacctgtgtcccaggctggccaccatttcagccagatcttctggctctggtcccagctttgcccctggccagctgtgtgacctggcaatgccaactctcctctttgagcctcagggtcttatctgagagatgaggtgacctttaatcccttctggctcttaaactttttgattctatgaaggccatgagtctttctgacactaaacccacatcatcacaacagatcaaaggatggaaaacttaagtgcaaataaaggtcgaataacacatttaaaggcaagtgcttccaaacaccaagactcaggggaaagctcatgtttgcagtagtgtctcagaattcttctataaaatgggctgaaaaaatgaaagtattgctattaggccaggctagtgtcaataacactaagtgggtccaggatttttgttcacaattggcatattttgtcattactagataccatatctaatacactttatatatcaatggcttcgtgtattgagaatgtacccagacaccaggaaagaaatagaaaaaaaaaaaaaaaaggctacataaccctaaagagaggatttaaacttcttgagaaatttttatgaaaacatgtgaaatctcttcattggcaaatgccttaggccctcattcgaagaccatactaacctacagaaataaagaaaaggattcttaatagctcaggttgatcaagctcttactgtgtgctaggtacttttctcaatatataacgtaacttacgtatcttacaaaaattttaaagagtcataaattctattcttatccattttatggatgaggaaactgaggccactcaccctgacattttcctacaggggccactctcctaaccatcaaaccacatcacccttctaaatagaaagagaaaagggctcctagtcacagacttgctgagagtctgacaaaaacagagatgtcaaagaaactgtaaaaagcacaggtaatgggaaaaactcagaaatttatagtgttttgggaagcaaaagtaggacattttactgatctgcttatttgttaacttacctaatttatctgtttctatagcacatactctgtaccagaccctaatgtccttactttacaaatcttcactcattctattctctcaacaaccttgtgaggtagagagtgtaattttactcattttatacataaggaaattgaagcccagagaggtccagtaagtctcttagttgacactgctagtaagtaccggagccaggatttagagtgggccagacacaccacagtgctgtgctggttgatgggtacttcctttctgggggagggtggaggagatgaggtctacctttgtcacccaagctggagggaagaggtgcaatcttagctcactgcagcctcaaactcctagactcaagtgatcctccagcctcagactcccaagtaactgggactacaggtgcatgccaccacacctggctaaacaggtacttccttaatttacccacggcattataaaaagggaggttcatttattcatttggcaatactattattgctgcatactaattttaatattgcttgaaagcagtattgaatatggagggatgatgagtttcaagaaaagattaaacttattttggtatttcaggtcgagattctcttgtacattttagaaggattttctttcaaaacagttatttttgctattgttttgttgtttatagtatcaaactccaactgtttgaaaaacccaacatcaatactttagattttgtaaggatacatgatttggattttcactatatttgggattagaatagcaattataatgagatgagccaccatatttactttccaaacagatgagagtgccaaggtaagaaaatggctataatttagtttattaaaattatataaatttatttctaaaacaagaactaagtcattgtctgtaattctcttatgtaataccctctatcctcaagcaaaataaataaaatattcagcagaaggaaagttatttgagattgcctacaagtactaagaaaactataatgggcatttgatgtatcttgtgtcttaattgtcaactgtgctcttcctattatttccttttggcacttttggtgagcagactgtctgcttagtgttaacattagttttaggaaaaagacctaaataaagtagaaaaccaaactcctacaggcatcagtcattcaacaggatggttttctctaaaggatacaaccctttcacttgtgttttaaaataggcatagcttagtccacagaaatcccttaacctgcttttgggctctgctaatatccagtgacatcttttgaagtgctagtgttttccaggccctctttacccacttaaagttatatagtgtacagcaggatcccaattagcagaaatcagtgaagagtaaaacacgatattgcccagagaatattttatttaaattgtacagtgtgataaaatacatgaaaacagagttgctacatctcataaaagaaacctgagatttaagaattagttgaaaatatgtggttgggagctgcgcagagtgatgagtggctgtgttcaaaatgagaactgcttcctcattttttaaaagattttattctaaacctaaatacaacatatggcttccttccacagctctggggtggattcagcagtatattttccagatcagcacatcaacttcagatctgtgacaccggccaggcagcctgaatcaattaatttgaaagcctcgaagagcatggaccttggtaagcaagggtgaggtgacatccaggtcagctctccagcctcagcccatttatcttcccaaatgtcctggttttgtttcttcaactcaaacctcagggaacaaggtctgcagaagcctggaggaagggataatggccatcccaccttcctatctcttcgcacatttaattgtaattacccactttgtgaaacaaagagaagtgatttatttttacaaagtgatctataaactatcctcccatcatagatgacaaaaatgattccttctggaggatctgaattccagaggcatctttatctcatccatctgcctttgcatttgcaccctcgcttctgccagggcatttccactctgtgcgggcatacctgttgcagagcctgggaaaatcatgtggttcaaagcatcctttgccttagtgcttcacttccttctattcttctccatgtgtgatggatagagatggcatcagtgcagaagattcagctttttaaatgcccatccccaaatcctgtgacactggaggggaaaagggtctcttgggcgtgccacactgagggtgtcaaggtaccctgtgtccatgcctgaacaacctcactgaggttctgagcaccatggggaacttcgtggtgactgttgggtgccagggcagagcaagggcccctgttaactgtgttctgaaagccttgggacatctcagataccctagagcatcactgccctcccatgggctcttagagagaacaccattagagaaaagtatggatacaataaattctcagcaaaatatccattgcctcatgaatgcttggaggccaagctttgcaattgttttttctcaaggcatattatatatttctttagtaacaacgagaaaatagaataatcaaaagtgcgtgctccaccaaacgatctgataaatagtgcttttctgttactcacttacaggagttcagaaaaatgttcagtcatgatgaaacaagagaaattgattctattttgtataaattaactaaatgactgggatgcatttgctgtaatcgcctgtagtgagagacagatagaaaccttaacaaggaagctgtcttgagcactggtcagaaagagtattttctcaagcgtgaacctttgacaaaccaaaggaataatttgtgacagtgacataggttattactaattatttaaagagcagttcattttcatagagtgcttgataaacatttcctgttctgtcttcccaatttctctgtaaagaagatgaatggatcaaaactgctcttatttttgaggagagaaatatatttgttttcctcatttaattaaagcagccactattatgtttctaaaaagaaaaaacagcacccattttaaattaagagagaaaaaatattatgaaacctgtaaaaaataaaaccaaagacatgtgcagaatcaatatttttgtttacattttaattttattattattattatttttattttgagatggagtctcgctctgtcacccaggatggagtgcagtagtgcgatctcggctcactgcaacctccgccccctgggttcaagtgattctcctacctcagcctcgcaagtagcttggattacaggtgtctgccaccacgccaggctaattttttttttttttttttttgtatttttagtagagatggggtttctccatgttggccggggtgttctcgaactcctgacctcaagtgatccacccaccttggcctcccaaagtgctgggattacaggcgtgagccaccgcatccagccgttttgtttacatttttattaccaaaaactgttttttgagttttctcttctaaactgaaatagtcctagcaaaatatatgtagttagccgtcattctttgcatttttttatacatatgccataaatgacaacgataatagtaaggtttattcattttacaaaattggtcaggttacgagctattttcttcaggaccctagtaccaaactaaaagcattggctaaaatgcaccatgcagtggaaatactcaacagcatgctgtaaaaacaagtttagagtaatcatcaaactttgctcctttccaagaagtaccaggctaaagccaacagtctttcagaaggccctgagagtcagcattctagtaccattttgatcccttctccccagaacagtcaagtcagggagcctaacaaatgtgttagccttctcaatatgaaattcacttaggtgataccgcaatggtaaacatttgaaagtgtcttttctgtttcattagaggaatagactattcgttttccatttatagcactaggccaatgtaagagattaatttatttgctcaaaaagtaggtgactatgtttataggaataatcctagcaggatcttgattctttaaagcgttttaacattctttaaaacgtcttaataagtagcctatttaggatgaatacacaattcatgatgtctatttttgacctggaaaaccagcattttcatatggttcaaaatttaaaaaaaaaaccttctatttgttacataattaatttatattggctatttctcactttataaagtctgtaggaatcttcaaaggctgatggatcctatcagtagccttgtttttgtttcatatttgctactaagaccaaactagtattttaacttgcatgttaatgagtcattgttcatctgctcaagctattttaaaggtgagtggcttccatttacttattttcacttatattttcaaagacagacaattccaattaagaaaaaataaagcctccttattcccatcccttttacctattcatcagacacaaatatagtctaaaatgtgagtgctcctagaaagcactagttgcttccccatctatgtacatgtccacatcacatatcatttctttataatagttgcatagtgttacattcattaatcttcatttacagcttactttactcttccccttttaatggaatgtgggcttcattggcagttcttttgttgttgttttggtgggtttttgagtcgtttgtgtttaagattttgcaatttgtttatttatagcctttgccacgttaccatttgttaattttgtcctctttcatttataaaatattgttacatgggatgcaagtgatttttttgcaacccattatttgtctttttagtttgattgtgatatttctcatcataaaaaaggtttcagtcttattctcaaatattttcatcatttcttcttttgtgacatttgggttatatgtttatctcattttcctctggtacttttagaggctttaaaaatatttaggactctatcatatatttttatccatggggtatgagatggaagaattttctcacataaataagcaaattattaataacatgtattgacttctccgttctttccctattaatttgaaatttagtcacattgaatagtaaatttgcacacatagatgtgtgggtttctagacatactattctgttgatatattagtccatctcatgtcagcatcaccccatttaaattatcttgctattatgtcttgttttgattacttacaggataatcttcctttaatttttcttcctttgtgaaattactttggctcttcatatgtactcattctcctgcatggactgtacaatcagctaatcaaaatgagtttaaagatgaaacaggaatgcttccactgtggggggggggtgtgtgtgtgtgtgtgtgtgtgtgtgtgtgtgtgtgtgtgtgagagagagagagagagagcatgcacattaattataatgtttgctattggcttctgatggaaacatttgatcaagctacataagtttctttgcattcctaacttcctaaaagttttttgattaaatcatttattttttttaatcaagaatgaatgtttaattttagtaagtgattttaaggcccttactggctgataatgtggattttgttctttattctattagtgaaataaaagtgagttaattaatagattccccaatattaaatcttcgattctttttcaatgactctaaatttttctctttacttgcaaaaatgtttattgattaactacagatatgtatattaaacacttcttgagatggttaacacattatatgctctaaaatgtaggtgtacaactctgataacaattttactcagtgtcattaattcctatatatacattataagtataatgtatatgtagcccttttgaggctgctttgccttgggattttgtggatacttttactggcatgcatgtggtcacatttaaatcagaacagaaatgattaacatgataaataaaaggaaatttgtttttaaataattgcatgtagtcatgctaattcaaaggggttagggtgtcacttaagagactggagagtggatacttctgggttttggagaaaatcaatcttttcctactaattgtagacttttccctatttatttaaattaccagaattactgtgttcagtctggactcctttaatttgttcataattgagcttgtgtgggtgttgagttggaagctctcaggagctgaataacacagctgcctctttggcctttggcatagggttttcccccaaagagctgcccttgttggcagtatgccaggaagttacattcaaagactttttgatgaggcataaaaatctttaatttccaggcttggtgttttatgaccccataatactgtttgagaattagtctgaattattcaaaagatagcacttcagtttgttggccccctttgttgacctactctgtagccccattcagagttaagtttaaaatgctgtttctcacaagatactgtttttagagttttctatcctgtttcacattggcctcccacgcccatttcagaagggtgttctataacacagtttggagaaggctaagggcagtgcaaatggaagatgctggccagctgccctgttcagtaagaggaaatgagcttaaagtgatgcatgaggcattcagacgaaattttaggaagtttcctgacaatgaagattgttaacattccatgtctcatagtcttttaagaaagagcatgtgtcctgaaaaactctccctaaaatcaagacgataaataggttggctgacttcctttcaagattagtgattcaccagttttattttctgttagttacttgctctaatttttttaaattaggaaatgtttttagacacccacaattgaagtaatttataagccaactgagttctcacatctacaaaggtaaatatttgagatacattttgaatatgaaaccttttatatatgtcagatattcctcttagacagtacatttctagtatcagctcaaagatgagcatgaaaaaagccccattctactgctctaatactttctttttaagattatattcatatagtgaggtacttctatatgaattattgataataaagactgaatacataggataatttttataaaattgtatattctaataagtgtgatgctggtttgtattaatatataaaatatattttactatttttatttatatccatggatttcttttattgtccaccaataagtagtacctctgaatatagttaaaagctgaattggatattactgtttgggatacaactttgacttaaagaaaagaacctgttttgtaaagaaaaattaatggtaatattgtaagaaagtgtctatttgtataatagacaagtatacaaagatgaagtcagctatatactttaagctctagtaagtcaaaataaaggaattatagagaatgttctttcattaagtaaatgtttattaagtgcctactgtgtgccgggaagtgcattaaacactggagatgtggtaaataaatgaaagaaatggtgcttgctgcctgtacctagattagaaccccaacaggaaagaaaagctcaagagttaaggaaaaactaccaaaaggaaattctgacattatgataacttatctcagggaggaagaaagggaagaggcatctgaagacactcatgtggctgcctcaagaactcactgataacctcggctatgtagaaaagaggaagagagaagcaaatgattaaaatatatacatatatgtacatttttactgtgtgtgtatatacacatacacacacacacacatatatatacacacgcacacacgcacacacgtagtaaaaatctgaaataatatatgcaggaagaggtaaacagctgcatgagaggagacttgcaaaacctagtaaaagttagacagccaagctatttttaaagcatgaaaaagaaagtgtgcgaggtggcccattgttttaaacccctgctagatgtcaggtggaaagcaaagccactcagttcctgtgttagtattatcctcatacataggagagaatgatggtcaaaccaaaaaagcatggctgccaggcaatggaaaactagacaatttacatccctgtgcactaaaaggcttgtgattataaagtggccgtccctgatcatcagaaattatgaagagtaggcctcacactggaagacaaggaagcaaatgatcaattttcagaaagataatgaattccagaaacaactggtaatctcaatgctgatcatcagatttccatgtttgtgaaattaaaaaaaaaaaaatgtggtggtcaccagcaatctcaatggagtccttgaaataactggtgtctcctttcctttttgatgggatttctaaactgctaagtcaggaaaatgttttacatataggttatgttgatgtttataaaagtatttccatttgttttcttattgagacttatgggtcaaattacatacagaggtagacacagcattaaaatgtcccttcctgaaatgtgctaattaatgtctcattgtcaccttggagaaaattaaataacatataccataaaacgacatctttattgtgttctgataaaactcaacagaatttgatgaagattggatataggtaatttggcacatatctaacttaatatttgtatacttccctgtctgttatacaaagcaaacagacctctttcagtcttagttaatttttctttacaaaacaggattttttccttaaagtcaaagaagagtaaagaaggaaaaggcactcttcacaaattttcaagaaataccgtcttagagaattgggtgatagattgacagaattagcattcagatgatttctccagaattgaagaagatagaatttaataaagaatgatgcattcattcaacaaggatttattgacacttactgtatgccaggcaacatcccaggtaaataagacaaaggctgcagtcttacagtgttttcattctcgttatgtaaacagatggtaaagatgtatacagtgaataaataataaaatttcacatgatagagattcaaatagaaatgttttttcctaaagccaaattcaggtagagagaatgactgaggggacgtgaaggtattttagatgggatagtgaatgataaaggttatgtcctaaagtcaggttaaaaaagattaattgtataagtgtaggatttacgagagtggggatagtaactattgaagtaatcccctggttcttagctgcttgcctgacacggccatccccagagctagttctgtgttttcagatcaaaggagaaaacagctccactttattctggcctggtcataacacatttacagttccatattcaattatgggtacaatattttaataactacaaagacagtatagaatgcaatccagatattggtgagaggcctagaaaccatgtttagtaaaaaacagttgaaagaataaagatattatgcctgaaagagagatgatttgagtcataggagagctctcctcaaatattttcatgcaaatattgaaagactcacatatgtttaaaattaatcagtaccccagatacatcaagcaatgataatcacatcagaagatacatcacatttacaagttttgaaatcgaaaaggataacagtgatggaaaacggaattctggtttatggcatgtttggtatgaaaggaaaaatatataaattaaaacagctcctgaagactgaaaagagaagcagaactcaccaaaattatgagaaagagaccatcatatatttttcagtgtttgacaagggatacaggttctttttattttttgttagagtattttaatatgattatgtcattaaaacatattatagggccgggcacagtggcttacacctgtaatcccagccctttggggggccaaggcgggcagatcacctgaggtcgggagttcgagaccagcctgaccaacatggagaaaccctgtctctactaaaaatacaaaattagctgggcgtggtggcccatgcctgtaatcccagctacttgggaggctgaggcaggagaatcgcttgaacctgggaggtggagtttgcggtgagcggagatcacgccattgcactccagcctgggcaacgagagtgaaactccatctcaaaaaataaataaataaaacgtattataatgtatatagttatatgttttaactacataactgtattataatatgtacacagattataacactgtgtacatattacacagaatataattgtagtgagatgaatagatgaaaagttgaatttagagaacctacctgtcagaactcaggctgaattcttagacatctctagtggtaaaagacttcagatagtttccagcacctccatccacggcaggcctctttcaaaacattaagaaaaccaacatttggattaaccaaaatttaacatgtaattatattttagatgattgctacatttaaagtgaattatagactattagtagtagtaactgaaatgtagaaatatagatcactataatataacttgatcaatatttcagatgtagcggaataaggcagattctgtttaaaattcattaaaataaccatttgagttggaagcaaaggtgtaaaaatggttctctatgtcaaggacatgcttttcatatccctgtaagtctctatctatcctttcctcctgctgtatttttgcattccctaggaaacatactttcaagaagaatttgactttgtattcattcttactactattaattggaaaacaatatcttttgtgtaggaattgtacttttataatgcttcatatgtttctagacttgtctaaaagttgtggcaaatgccaggccatccctgtcatacccctcccatgactaaatgctcacaaatgccataaacttagctgcactcttttataagttattgaatgagtgaataagaggtacaactttctcaaatgcccccatctgaaacaggaaaacattcggagtaaggatcatccctcttacataaaaacacttaacctaatgcctagaacatccctaatgcctagggatttggtggtgtcattagtaatagtagcagtcatggagagggtagtgttggtagtataattagaaatgagcttctacatctcctacaagtttttcttataattagtagtggacttgaacagtcaatataagtaaattctcctaaagttaagtattatgaaatgctgggagaaaagttaacctgtggatttcataggtatatccttaagtcaataatggggccacaaatggtctcaaatgttgccaggcagtttttcactgagtgtattttctcaagctgggggcatgtttaatggaatatgtagttaatttaaaatgtcactgtctctaagagaaatgtaagactctatttccccagaagagatacaaaaaaactataaagtttagaaaaccttaaccaatgatattctgccagtaacaaacccacgcagatttttactaaattgacctctgtgtacttagaacattgtctgtgctctgattagaaattttggtcaatggaaaaactgccctattctttaaaatttaaatattctgggctcctcttaaaacttggattagaacatgaagtgctttcttctttttattttgtactgaggctctgtatctaggattctaagccttttttttttcactttttatttttttactatacttttactttttactttttatttttttactatacttttactttttactttttatttttttactatactatactgggatacatgtggagaacatgcaggtttgttaaataggcacacacgtgccatggtggtttgctcacccatcaacccatcatctacattaggtatttctcctaagactatccctcccctatgctcccaccccccaacaggccctggtgtgtgatgttcctctccctgtgtccatgtgttctcattgttcaactgccacttatgagtgagaacatgcggtatttagttttctgttcctgtgttagtttgctgagaatgatggtttccagcttcatccatgtccctgcaaagttcatgaactcatacttttttatggctgcatagtattccatggtgcatgtgtgccacattttcttaatccagtctatccttgatgggcatttggattggttccaagtctttgctattgtgaatagtgccgcaataaacatacgtgtacatgtctcttcagagtagcatgatttataatcctttgggtatatacccagtaatgggatggctgggtcaaatggtatttctggttctggatccttgaggaatcaccacactgtcttccacaatggctgaactaatttatactcccaccaacaatgtaaaagtattcctatttctccacatcttctccagcatctgttgtttcctgactttttaatgattgccattctaactggcatgagatggtatctcattgtggttttgatttgcatttgtctaatgatcagtgatgatgagcttttcttcatatgtttgttggctgcataaatgtcttcttttgagaagtgtctgttcatatccttcacccactttttgatggggttgttttttacttgtaaatttgtttaagttccttgtagattctggatattagccctttgtcagatggatagattgcaaaaatttgttcccattctgtaggttgcctgttcactctgatgatagtttcttttgctgtgcagaagctctttaatttaattagatcccatttgtcaattttggcttttgttgccattgcttttggtgttttagacatgaagtctttgcccatgcctgtgagctgaatggtattgcctaggtgttcttctagggtttttatggttttaggcattatttttaagtctttaatccatcttgagttaatttttgtaaaaaatataaggaaggagtccagtttcagttttctgcgtgtggctagcaattttcccaacaccatttattaaatagggaatcctttccccattgcttgtttttgtcaggtctgtcatagatcagatggttgtagatgtgtgatgttatttctgaggtctctattctgttccattggtctatatatctgttttggtaccagtaccatgctgtttttgttactgtagccttgtagtatagtttgaagtcaggtagcatgatgcccccagctttgttctttttgcttagggctgtcttggctatatgggctcctttttggttccatatgaaatttaaagtagcttttcctaattctgtgaagaaagtcaatggtagcttgatggggatagcattaaatctataaattactttgggcagtatggccattttcactatattgattcttcctatccctaagcatggaatgtttttccatttgtttgtttcccctcttatttccttgagcagtggtttgtagttctccttgaagaggtccttcacatcccttgtaagttggattcctaggtattttattccctttgtagcaattgtgaatgggagttcactcatgatttggctctctgtctgttactggtgtataggaatgcttgtgatttttgcacattgattttgtatctggagactttgctgaatttgcttatcagcttaaggggattttgggctgagacgatggggttttctaaatatacagtcatatcatctgcaaacagagataatttgacttcctgtcttcttagttcaataccctttatttttttctcttgcctgattgccctggccagaacttccaatactatgttaaataggagtggtgagagagggcatccttgtcttgtgccagttttcaaagggaatgcttccagcttatgcccattcagtgtgatattagctgtgggtttgtcataaatcgtttttattattttgagatacattccatcaatacctagtttattgagactttttagcctgaagcagtgttgaattttattaaaggccttttctgcatctgttgagataatcatgtggtttttgtcattggttccgtttatgtgaaggattacattaattgatttgcgtatgttgaaccagccttgcatcccagggatgaagccaacttgatcatggtggataagctttttgatgtgctgctggatttggtttgccagtattttattgaggatttttgcatcgatgttcttcagggatattggcctgaaattttcttctttggttgtgcctctgccaggctttggtatcaggatgatgctggcctcataacatgagttagggaggattccctctttttctattgtttggaatagtttcagaaggaatggtatcagctcctctttgtacctctggtagagttcggctgtgactttgtctggtcctgggcttttttttggttagtaggctattaattactgcctcaatttcataaagacagatatgaactttttcttatcacttgcttttgtttcctaaaccattgttcatatttaaatgaaattctgtgttcctttttttttttcttttttttttttattatactttaagttttagggtacatgtgcacattgtgcaggttagttacacatgtatacatgtgccctgctggtgcactgcacccaccaactcgtcatctagcattaggtatatctcccgatgctatccctcccccctcccccaaccccacaacagtccccagagtgtgatattccccttcctgtgtccatgtgatctcattgttcaagtcccacctatgagtgagaatatgtggtgtttggttttctgttcttgcgatagtttaccgagaatgatgatttccaatttcatccatgtccctacaaaggacatgaactcatcattttttatggctgcatagtattccatggtgtatatgtgccacattttcttaatccagtctatcattattggacatttggcttggttccaagtctttgctattgtgaataatgccgcaataaacatacgtgtgcatgtgtctttatagcagcatgctttatagtcctttgggtatatacccagtaatgggatggctgggtcaaatggtataataatgggagactttaacaccccactgtcaacattagacagatcaacgagacagaaagtcaacaaggatacccaggaattgaactcagctctgcaccaagcggacctaatagacatctacagaactctccaccccaaatcaacagaatatacatttttttcggcaccacaccacacctattccaaaattgaccacatacttggaagtaaagctctcctcagcaaatgtaaaagaacacaaattataacaaactatctctcagaccacagtgcaatcaaactagaactcaggattaagaatctcactcaaaaccgctcaactacatggaaactgaacaacctgctcctgaatgactactgggtatataacgaaatgaaggcagaaataaagatgttctttgaaaccaacgagaacaaagacacaacataccagaatctctgggacgcattcaaagcagtgtgtagagggaaatttatagcactaaatgcccacaagagaaagcaggaaagatccaaaattgacaccctaacatcacaattaaaagaactagaaaagcaagagcaaacacattcaaaagctagcagaaggcaagcaataactaaaatcagagcagaactgaaggaaatagagacacaaaaaacccttcaaaaaattaatgaatccaagagctggttttttgaaaggatcaacaaaattgatagaccgctagcaagactaataaagaaaaaaagagagatgaatcaaatagatgcgataaaaaatgataaaggggatatcaccaccgatcccacagaaatacaaactaccatcagagaatactacaaacacctctacacaaataaactagaaaatctagaagaaatggatacattcctcgacacatacaatctcccaagactaaaccaggaagaagttgaatctctgaatagaccaataacaggagctgaaattgtggcgataatcaatagtttaccaaccaaaaagagtccaggaccagatggattcacagccgaattctaccagaggtacaaggaggaactggtaccattccttctgaaactattccaatcaatagaaaaagagggaatcctccctaactcattttatgaggccagcatcattctgataccgaagccaggcagagacacaaccaaaaaagagaattttagaccaatatccttgataaacattgatgcaaaaatcctcaataaaatactggcaaaacgaatccagcggcacatcaaaaagcttatccaccatgatcaagtgggcttcatccctgggatgcaaggctggttcaatatacgcaaatcaataaatgtaatccagcatataaacagagccaaagacaaaaaccacatgattatctcaatagatgcagaaaaagcctttgacaaaattcaacaacccttcatgctaaaaactctcaataaattaggcattgatgggacgtatttcaaaataataagagctatctatgacagacccacagccaatatcatactgaatgggcaaaaactggaagcattccctttgaaaactggcacaagacagggatgccctctctcaccactcctattcaacatagtgttggaagttctggccagggcaatcaggcaggagaaggaaataaagggtattcaattaggaaaagaggaagtcaaattgtccctgtttgcagatgacatgatcgtatatctagaaaaccccattgtctcaggccaaaatctccttaagctgataagcaacttcagcaaagtctcaggatacaaaatcaatgtacaaaaatcacaagcattcttatacaccaataacagacaaacagagagccaaatcatgagtgaactcccattcacaattgcttcaaagagaataaaatacctaggaatccaacttacaagggatgggaaggacctcttcaaggagaactacaaaccactgctcaatgaaataaaagaggatacaaacaaatggaagaacattccatgctcatgggtaggaacaatcaatatcgtgaaaatggccatactgcccagggtaatttacagattcaatgccatccccatcaagctaccaaagcctttcttcacagaattggaaaaaactactttaaagttcatatggaaccaaaaaagagcctgcatcgccaagtcaatcctaagccaaaagaacaaagctggaggcatcacactacctgacttcaaactatactacaaggctacagtaaccaaaacagcatggtactggtaccaaaacagagatatagatcaatggaacagaacagagccctcagaaataacgccgcatatctacaactatctgatctttgacaaacctgagaaaaacaagcaatggggaaaggattccctatttaataaatggtgctgggaaaactggctagccatatgtagaaagcggaaactggatcccttccttacaccttatacaaaaatcaattcaagatggattaaagacttaaacattagacctaaaaccataaaaaccctagaagaaaacctaggcattaccattcaggacataggcatgggcaaggacttcatgtctaaaacaccaaaagcaatggcaacaaaagacaaaattgacaaatgggatctaattaatctgtgttcctttttaaagaacttttgttttcatataagaacatcttcctaaaagtatgaagctaaggatgcttattcaaagaatggaacaaaatacttaagttctccttgcaaatatgaaccaaatccattttagttttttgaagtgagaatttcattagttgaaaatgttatatataatgtgcaattaaatatacaattaataattaaaatatacaattaaataattaaaaatatatgatataaatataggttaaatgaagtttagcagtttcataattatcccttctgaatattttgaatgataaaatttgttattggcaatactttatgaagtgattaaagacactgtaaggagagacaactatctgatttttagatgcagtagttgcagtttgttctttaaaaagcaaaatataaaaaaaaattagaatgaatgaataaggcctagtatttgatagtatgacagagtgactatagtcaataatgatttaattgtacattttaaaataactaaaggattactggattgtttgtaacgcaaaggataaatgtttaaggggatgataccccactttccatgatggattattatgcattgtatgcctaggtcagaacatctcatgtatcccataaatatatacacctactaagtacacacaaaaatacaaaataaaaaattatcttaagggataaaacagggccagtcatggtggctcatgcctataatctcagcactttgagaggctgcgttgggaggatcgtttcaccctgggagtttgagaccagcctcagcaacaaagcaagaccccatctctacaaaaaaaattttaaaaataaataaaattttttaaaaaataaaataaaaagaaaatcagctttagtcttacatatttttattctcttatatacctacctgtgttcttatattctaatttttctcaagtgattgtaccaaacatatttctttaaatttgtattaaaaacagtctaacctaaacattgttctctggatctttacttctacaacattatcttttagttgtaaagtttactctggaataaatgtagcgtgattcacttgactaatattatactctttgccataaaagttgtttccaattcttcacttctagaaacaggaatgcattgagcctgctagtacatcaacctttgtaaacaatcatgattatgttatcattataatttctatacgtgtactccccagccagatgatgtattaaagatatgaggcttttgattcatatgaccagttgccctgcagaaaagcagttttgctcgtatcagcagtatatggaagaatctgggtgtcatcatttttttttcatttttgccagtgttataggcttaaaaaggttattttattttacttttaaaatcacttctgtggttaaacctctcccagctgtttgactgtatgttttctattgtgaatgatctgagcatttcctttataaggctgaaaatttctaaagtaaatatcactttttggaattaaaatgttactctacattaaagatcaaatttcagcccttgctcacaggggaaaatagatactttgctttcatttaaatgttaccctctctgaagtacatgctaatgaatacatttgtgtctttcattaagtgttcagaaaaatgtttaactaaacatgaggcagaggcagaattcagatttatttatgataaaactgcttaatctgggtcaagtcaattaatctttctaaaaataatttatttttggtttttcatcagaaccccagaagccaatatacttgacatacagcagtgctggctgctttagagcatattagtacaaagactggcatcaccataaacacctactctgcttttataagactgaaaagtgcttgaaaatacaatttcagctccatgtgaatgtatgtatccatacatacaatagatgtatggatgcgaaagtcatccatacatctattccctccttccttcattcatcatttattgggtgcactgtctatgccaggtaatgttccaaatatttgagacatatcagtgacaacagacagtatcttatttctgtagcttacctttctttagtggaaatactctcatgaacaaagtttgagcgatgaggtaaataaacgataataacgcaataagtgaataaagttgctggaaagatatccagtaggacaaacataacactacaaattgtggaaagaggaaacatgactggaaaggctagtgtttcaatacccacttggtttctagtgttcataagaaaaggtaactagcaacactatccaatgaaggtataaaaattaaagtgaaaattaaaatagagatcaaattggaaactgactaatcaagactgatggttttaagtgggctgggaataagctaatctgtcctctgctgatccaggaactaactggcataatccccagtccccaaacgcttcagaattgtcttgaaagaattgtgagagcctgaaaaggtttcagcttggaattccttaaaagtaaaacaagggggtaccaatgaattggagaacatttagcatgttttcaaaatttggaataaattatcatagcacccaaattgaaggaaaaatgagttccattagaatttttttattttcagctttaataaataagtagatgtcaggtaaatgatctcagtgctttctctgtacccagaaaggccagagggaaatcttaggtgcccagtcctctcacttgaggctaatagtaccaccttatcaaagattgaagaatatatttgttaatataaacagtattcacaaaaatgtcagtgaaactaacagattggcggttttagtagtgactttaatgataaaagtctcggaaatgctgacaaagttaaacaggcttcttaaatacgggattgctcacaaccattagtgcatgttttgtacgtttccaggcttcaagaatcttcaggatgtaataaatgcagcatttcccaaactcatttgatcacagaaactttgagtacagactatctcataggtctcatcctttgaggaatgtccttagcaaagaagatgtgagtttgcttgtgagatttaaaggtgatgtgcaacagccagagtagggtgaggaaggattgccaacaagctgggacacgtggagcaatgctgtgaagtggggtgtaacctgagagagaatctccagggcagagaagtgtccacagccactaagcaagtaggaattaactgcagagcagcaagaatgaacagggctgtaatcaactaagcatacattaaccatggacggtgatgatagaatgtaactgacagcactgcaatatgcctccaaaagaatggcaaaagaatggtaaagataacctctgatgttactgattatctgtggccagaaacctttgactctcttttacatatggtaaaaagatcaagccctaatatttaagcttcagtgcctattaatctagaatatgaagattaaaaagaggaaaagcattagtagtaactgtaatcttcatagctgtatgtcaggcatagtttttttgcacagcaattccatcgccattttacagatggggcaatcagggcttaaagatgttgacttatataagatatctcagctagtaaatggtggggccaggatttgaactcaggcacatttaactttgatggttgggcttcagaccattatggctgtttcaaataaggcttgtcagtttcccagtcttaactcaaaaacagacgacctattctctctccactcttttttaaattctgtctttcattcaggacccattcaaatcttgccttctctaggggactgtcattttttttttccagctccttttctgaattcctaaagcagtaactattggttattcaacttcacaagtaattaagaaaattgagatactatatcttagcacagaatggcatactcctttgatattcttttgagtgagcattttttttcccattccaatcaggttataagcttctacaggtgatactgtatacttcttgggcacctcccttcaccacttagcatgtgtaggtgcccactaaatccaagatgaatgagtgaatgaatagtgttggagcaatctggctgcaatctcagaaaccccgtggaccacgatgattgatttggctcatcttactatctgggcaggttcccttttcctacatcaaaagattgaataaataaaagtagaaacaaatgattaaatgacaagtgaataaaagtgcaaattaatggtttgtttgagtaggaaaatagaatgaggataaaggtagcccagaacatagcaccatacgctcatattcacttacctggttttgtccacttaaaaggaaagtgtttgggaaaggctgataaaaatgaacgtatttaaggaaggaaccaaacacaggaaataaagaaggtcaaaggcttcaatttcattaaataaagaagaatgaaagcagttgtttaaaacttgaagaaaagggctgtgtgctttatttcctaattggaggaatctatgaataaattaggcaatcacttgacataattggtttaggtcatgtgaattcacttgcaccacaagagagggtaaattagatcaaattgtttgtggcccctcctagtcttctgttcattacaggcattcttttttccttttgtattcctctgtatcttccttttaggttttttgtttgttttttaatctcaagaagtatgtgtttttatttatattattttaatgtataagatgtttttccttttggttgcagaacagagtagaagataatattcctgtaataaaaaaatttgtgtgcttcttatttattaatcccattttgattttttcataaaactgtttgcacaaaaataacgtagtctgtacataaacacagtgccatgggaattatattcaaaacatgcttgaactgcttgcttttacctgaagcaacatgaaattgaattacattagtatagagcaatttggttgcatgtcacttgtggcaaatattgtgtaagctgaatatttagagattttgttcaccttgggtcacacagtattagttgtcacgaaaaataccccaaggtgataccaaaaaaaaaaaaaaatcctgactcaaagaagacaattgactcaaaataaattgagaatattccattccaaatggtttaaacacttggtacagacccaatgtagcttcataatttatgcaaatttttatctgcaaagcaatttttgtatttaggtttaatcaaagagcttaataatgcaagtacaatctatttactgtcacctcatatgctaagacaactgagaaacattaaaaggccctacgttcgcatgacccagtttgtacagtagccagcataacttcttgatgttgatggatatgtgagttaactctaaaatgggctaaattaactaacccattagatatctaaatgtgtatccctttaaaaaatagtacttacttaaagggcttatccgtgaccaagctataatttagagatgttgttatattgaaaatgtggtcacaaagtcatttaagggcaagaatttctaaaggcggctcagtctaattgtccaccccactgggaaaactgatgatatgcttcgtcattaatggattgggaatatcatatctgtaaaagaagttaatagccttaaattgttgtttaatatgttattaccatgcacttttctaggtgtgttttagaaggttcattttaaaaataaaatgctggtgtgtaagagaaatacttggagaagcttatttcaatgaaaagagaaaaatttgtttaagttggagaagatatttactatggataatatatgtaaaaccaagaagtgatcctaagagttcactttggattacattgttcttttttttttttaattcagcaacatcctgtaaagttacttgatttggaaatgccaacattcttaaaataggattaagagacactgctttaataatcgctccctattatccacatgttctttgtcattcaagagaataaaggaataattagaaaatacttgacaaaagattaacatccttaacatatgaagagctcttataaattatgggaaaacaaatatttcaattcggaattggaaaagtatatgacaattcacaaagggcaaaagaaatttatttgggacataaatatgaaatatattcaacctcacaagtaattaagaaaattgagatattatattggcaaacattggcaaatgctgaaatatatatgttccagtggtacagaacatgcttgttggccatttaaatgaatgctgctttctgtaaggcagagtggtaattatataggcaccttaacactattttcatcttctacccagtaattctatttctaaaaattatcctaccaaaaaaataaaagacttgaccaagatggaatataaaaattttccctatagttaattttccagcaataagagaattagtgaaattatataatattaatctaatctatataatacactattatgcaactaatagaaatcttcagaatgcttcatgaaataaaaaatgttaatggtaaaatgccagttaaaaaaagcagagtatacaattatagtagtgtgtatgtgtgtgtgtatgtatatatataatcatgtacgatgtagtaacatttcagtcaactgcagactgcatattagtcccatgagcttataacagtctatgtttactatatcttttctatgtttagatttgtttagaaacacagatacttaccattaggttgaaattgcctatagtattcactatagtaacgtgctctatgggttaacagcataggtaccataggctaggccatatagcctaggtgtgtagcaggctaaaccatcgaggtttgtggaagtacgtgttatgatgttcacacaatgatgaaactgcctagcaatgcatttctcagaacctatctcagtcatctagtgacgcatggcttataaatcaaagaagaaagtttggcaaaatgttaatattgactttctcttagtggaagttacgtgtataatttttactttattttttatatgtttctgtatatttcaaatctttaccacaaatatgtattacacatataataaaatcaattggcagtataaaactaattttaaaatagaataaaaaagcagaagcctgttcatggtaaaaagaaatgcagatatttaactacaaaaaggacaaaaggggtatgaagtatgtttaatgcttacttcgtatcattgaggacttatcacctggaaagacaaataagaatatttatggggcagaatgatgacatgtttgttaagaggttttaggtcaacacagaacagtactctttatcagttaaaatagcattagctacgagcacattccactgcaatgctcagggatccgtaccaaactgttgttgtaagcaggagttcatttgtcttatgtaatgtgaagcctgaataaggccaatccagggtctccgtgaaggtaccagaggcctaggctccttctcctcttcactctgccactcttgactttctggctctcgcacccatatttgtcactgtggagtgtacagatggcttctatgtcttcagcaatcacatccatgtttcaggcaaaaaaaaaaagtaacagaaggcaaaagggtacgccaacattcttccctaattcaggaaatccagtatcagctaagaagtgctgtccagcaaacttctactcttattcattggccaggactatcacatgtcacatactgtctagccagaaagtagctagggaaaacagggttgtaggtggcattggatcagtcaagctacatgtctgccatagccacccagtgtgtctgtaagtttctggtcactgcatgtgtgcagaagtgcacagacagcctcattagttaggcagaatttctgagttgctttagatcttagtcctgagagactattattttaattttgttttgacagaattgtagaataagtagaaaaatgataagagagcaatgtcctgattctctgtccactgccaaagtcaagcttggccaattatatttaagctggaacagaggataagaagtgagagttgcttgagagaatcatagtaccatcttcaaacagagaagctagtgaaggaacaagatgcaggaaggagacacccagagagaagaataaccagagaagctagtgaaggaacaagatgcaggaaggagacacccagagagaaaaatataacaacaaattactattttttcttaatgtctctaacctactggttttaaattttatatatatacacacatacatatatatatacacacatacatatacacatatatgtatgtgtgtatatatgtgtgtagataagtatatatgtatatatatgtgtgcatgtatatatgtgtgtatatatgtatatgtgtgtgtatatatgtgtgtatatgtgtgtgtgtgtgtgtgtgtgtgtatatatatatatatatatatatatatttttttttttatttttttgagatggtctctcgctctgtcacccaggctgcagtgcaatggtacaatggctcactgcaacctccacctcctgggttcaagcgattcttctgcctcaacctcctgagtagctgggattacagacgtgcttcacaatgctcagctaatttttgtatttttaatagaggtggggtttcaccatgttggtcaggctggtctcgaactcctgaccccatgatccacccaccttggcttctcaaagtgctaggattacaagacatgagccaccacgcccagcccaaattttctatttttatgtcctaaattgttgaagcaattcttctgatcgaaacaggcaagggttttatttttcttatgagtcactataggcacaaggcctagagcctataagctttacaaaaacctactgaagtatgtgagatatgaacaaaattattggctgtaatgtatgaacataaatccaagtgtgaaattaataaatgtttatccctgaaatggaagcttatgccaattttagtaattattacacttagaatttattattttaaaaaatatcaattgcaaaaaggttacacttttggtttttttacaactcaaaagaatttctaagtatgcagagagattgctaaaaaaatcagtcaatctataattaactcataggcaaataattgtaaatagattttgtaaatctctttcaaatttttacagcaaaaattttatttaatgtaggagggggatggggaggaagagagagtagcaggagagaacacactatgggtacagcccattgcttttaccttttccctccctttattatttgcctctgagatgtccaaagaaatctctggtcttaggaaaaaaagattttaaaaattactgcctgtggctgggcatggtggctcatggctgtaatccaagcactttgggaggctgaagtgggcagatcacctgaggtcaggaattcaagaccagcctgcccaacatggtgaaactccatctccactaaaaatacaaaaatcagctgggtgtggtggcacgtgcctgtaattccagctactcgggaggctgaagcaggagaattgcttgaatctgagaggcggaagttacggtgagctgagattgcaccactgcactacagcctgggggacaaagggagactctgtttaaaaaaaaaaaaaaatgctgcctgtgaggtcactctggactctgggtctagccactgtctgtttgtccagttaatgttttctattagctcaactttgttcgagattcttaatataactcaatactttccaaaaagctagcagatatttaatatgtatgtgtaatcgccttttctgcagaaaggagcgtgatttaagtgagctcatctaatagatcagtataaaataccagatgagttcactagagtgtgtgaagaactttgtgcatcccatttaagtgaatggttgtgtgctctgaaatgaagagacagcacataaacccccaaagttaataaactctaataaacaatgaatctggatgacaacttttcaaaatctattacacagtagtagccctggttttgcacagtttgcatattaaacagatgatagtagattctgggcagaaatatagacagtattatgtacttcaattcgtgccagaagagaaattttttgatagcacttattgtagccaagaacaaagcagctatacaatccccagccagaaaccaggtgccaaaattaattcatgcaagaataaaatgggttggcaccttatggtaaagtcataagctcttgaggaaatgcacaggaaagttctgggtagcttgagttactacgtctttatggttacttccattctgggctggctcattaactttgcaataagaaataccatggaatgatcagaaaatgttttcacccagccaggaaatctcacaaccacaggcaaaagtgccatgaagagagcagacatggttttcagtaatgtaagccctgcacatgatttggatatagcaggcttacttgtcacgtttgtaggagccacataacttggtaggttagcaaatcacactggatgacagaatcaggattcaaaaaggtctcaacagggagaactgttgagccgcaattcagaagattaaatttaatagggatgaatgtaaattcctgtatttgggttcaaaaaaggaagcaactgcttcctgccttactcccatccaatttattttccacgctgcagcctgggtgatcattttaaaacacaaatctgatcatgtcacttccttgctaaaaatcccttaacaacatcccattgccctgaggatgaagacagaactcattaatgtggtttttgagattctctatgactggccccttcctttctcttccgcctgttctctctccaggctccctctcacactgagcaccccagccaaatggaagatcttagggttcctcattttaggctgcttttaggttctcatgttttctttgcccgaaacacatcttcccaatttcctatacatttccagaaaagcccaatccatgggctactgttaggtgcctcattaccaactttcaaggttctctgaccagccttttatttaacaaatatgtattgagtgcctactacatttcagacatgttctaggctccagagataaaacagtgaacaaagtaaagctcatgtccacgtgaagcttatgttttcttggggaagatgccaggcagtaccaagtcttttgaagaaaaatggagaatgataagaagataatgatggacagtcagggttgggaggcctgctttacatagggtggcgatgggaggacctctctgataagatgacatttttggagataagatcaaaggaggtcagtgaactttgtggctatctgtgagaatagcaccacagtatggaaaagagcatgttccaaaaccttgaggaggggcatggtttgcgtgtcctaggacttgtggtgaggctggattgggtgaagtaccctgatccagggcagagctgtgcagatgatattggaggggctgctgcactcagcccaggcagggcttggaagctgtggaagcctttggattttcttctaaatgtggttggaagctaactgggaggctttaagcaaggggctattataataagatttttgttttggtttggttttagtttttaaataattacagtagctttgttgtggaaaatagaccatagggactaaatgcagagtcccacagattagtcaagagatgttacatctgtcaaggtgagagctggaggtagctttggccaggtaggtttgctagcacttactccactctttgtgattacttgtgtgttagaagccctgccagtgcagggctcaggactaccttgctccttttacaacctcagtgcctagcatggtgcccgatgtaccaccggctctccgtaaacattcatcggatggagatgatctggtttaacggcagttagtacgaaaaacgacttcaggatttttagctgactgcacacagttgatgagccagcagtagcccggttcagctgccaggaaagctaatgctgtcttaggtggcattaaaaactttggtgagggtgtcagtgaaagggagatgtgggtcctagggtgctccatgctgtttatgctacactggactgttggcctgatcctacactactttttcccttgtatcttctttctaataatggcatatttcaatcacgaggccacacactttggattcatctgtggttctttctgttgcttcattaccatgtacaaacaataaattctctatgatatcacctagcactgtctctctctctctgtctgtctgtctccgtctctgtcttatttttcccttttcccctgctctgacacaatgccaacagtagtccatgcctgtcttggtaaaagtttccaggtgcgtgagactctaaacaacttattataactcttatttctgagagtatcaacaattatttttaaaaacattatatgctggacacatagaggggaacaacacactctggggcctattggagggtggagggtaggaggagggagaggatcaggaaaaataactaatgggtactaggcttaatatttgggtgatgaaataatctgttcaacagacctctattacacaagtatacctaggtaacaaacctctacatgcgcctctgaacttaaaagttgaaaaaaaaatcccagtaattttctcatgaaaaatacccagaaagttaatgaactattagaccttccaatataaaaaaaaaaaaagaaacacatatgctgtttcatataggttggtatgaaattctactttagtagatagtgttaagtagtagaaatatgtagttctttatggcaaagtcattagcaaaatcttctcaaagtcacacagtagaaggaatttgtgctttgaagtcaggaacccttcagatccctgctgttccacgtacaaactttatgtcataacccttcttagcctaagttccctcctctgtgaaatgaagataataaaacccaactcaaagagtttttgtaaggattaaatgagataacacatattgaaatgcttaccatgatttctgacacatgctaaattggtaataagttttcatttccttcctatctgttaaaaaaggggtcactagacaatgtgaaaacatacattataaatagtggaaacagaggtgtgttttccatcagttaatagtgaataatggccgtttgccttaaggtagcctgtgccccttttattgatggtttaatgaatatcaatttcttgctgatagcagaaatatttgtcaaaggtctgagaatcatgaaagcttttacaatttgagtggtaaacatagtccatccctgacagattccagaaatgagcagagaatgaggtttcctaggagcaatcttgcacaaatagtcttttctctgtgtcaggtgggaaaaaaaaaagatggagcagagacttcatagtatcgttgtaaactgtaactgtttattttgtaaagatgagtaaaatgctatctttgccttcattgaggttgtccataaatcagtgtagtacagagtagaaagtggtacgtattcttggaggaaatgctaaagtgttctgaggcaggatcgggagcagagatggagagaatattctaggaagtacaggtcccagaaggagtaacagtgcagcatctaaacatgtgagatcagcggcattttcaacaagagataaacacaaatgagaaaaaaacaggaatcactctatgtgacttgaagatgaatagaggataatataatggaaaaggtaaaaagggtacaaatctgggatacaaagataaagagaatattattcataggcagtgaaatattagtgaaggtttggagtagcttagaaaaattatgaaagtgatgtttagcatggatgaatgttgatgtggtaaataagatgagtagtagagttacagagacagaggtgggtcaagagcaagttggaggcaattgcaaaaattcagccatggaataacaaaagccataggtccaggtatgagaattcttgaaaggaagacctgacggctgactggctgtgactgctgctcatgaagacagcatgtatgttgtcaggacaggagaataaccctgagcctagatatggtttcttttcagtctgcccactcagctgctttctttttatggtcctgtattcaaaaaaaccaaccaaccaaccaaccaaccaaataaaacttgcctgttctcagcaatgatttcataatatccttatgtaggaaagaagtaagtgatgagacctccaaaggatattgtcctcagccactgatcacattcttagcttagtgttcttccattatgtttccttttaattttgtagttatgtgataagtatatatttatggggtacatgagatgttttgatacaggtgtacaatgcatactaatcacatcagagtaaatggggtgtccatcacatcaagcatttatcctgtcattgtattacaaacaatccaattatactattttagtcattccggaggctgaggcaggagaaatggcatgaacccaggaggtggagcttacagtgagccaagatcacaccactgcactccagcctgggtgacagagtgagactccatctcaaaaaaaaaaaaagaaaataaatgggccaggcacggtggctcacacctgtaatcccagcactttgggaggctgaggcaggcggatcatgaggtcaggagattgagaccatcctggagaacatggttgaaaccccgtctctactaaaaatacaaaaaaattagccgggcatggtggcaggtgcctgtagtcccagctactcgggaggctgaggcaggagaatggtgtgagcccaggaggtggagcttgcagtgagcggagacagcaccactgcactccagcctgggccacagagcgagactccgtctcaaaaaaaaaaaaaaaaaagaaagaaagaaagaaaaagaaaaagaaaaaaaaagtacaataaattattgttgactgtagtcaccctgttatgctatcaaatactagatcttattctgactatatttttgtgcccattcatcattcccacttccccaccgccactccccagaagccccccgcccccaaccccccagcacacactagccttcccaacccctctggttatcatcattctattctctatctccatgacttcagttgttttaatttttagatcccacaaaaaaagtgagaacattcaaagtttgcctttctgtgcctggcttatttcatttaacataatgacctccagttccatccatttgttggaaaagatagaatctcattcttttttatggctgaatagtacctgatttttttttcttttctcataattttttattccatgggtcgaaagaaaaagaaagagataattatttttgccaacctggaactggccattcaagccaacatgcttgaaactttcttttatcttccataaccatatttttttcctattttttattatactttaagttctagggtacatgtagtacctgattatttatatgtacattttctttattcattcctctgttgatggacaattaggtagcttccaaatcttggctattgtgaatagtgctgcaataaacatgggagtgaagatatctctttgatatactgatttccttgcttttgggtatatacatagcagtaggattgctggatcatatgggagctctatattgagttttttaaggaacctccaaaccattttccataatagttgtactaatttacattcccaccaacagtgtttgagggttcccttttctccacatccttgccagcatttgttattgcctgtcttttggatgaaagccattttaactggggtgagatgacatctcactatagttttgacttgcatttctctgatgatcaatgatgttgagcaccttttactatacctgtttgccatttttatgtcttgagaaatatctgtgcagatattttgtccatttttaaaatcagatttttagatttttttcctctggagttgtttgagctctttatgtatactgtttaataatccattttcagatggtatattagtctgttctcactcacactgttttaaagaactacctgagactgggtaatttatgaagaaaagaagtttaattaactcatagttctgcaggctgtacaagaagcatgactgagtggcctcaagaaacttacaatcatggcagaaggcaaaggggaagcaagcacatctttacatgtcagaccaggataaagagagaaaaggggaaagtgccgcacacttttaaacaatcagatctcatgagagctcactaactatcatgagaacaaacagcaagggggaaatccacccccatgatcaaattacctcccaccaggtcctttccccaacatttggaattacaattaaacatgagatgtgggtggagacacagagacaaaccatatcagatgggtagtttgcaaatattttcacccattctgtggattgtctcttcactttgttcactgtttcttttgctgagaagcagctttttttgttttgttttatgagacgaattctcattctgtcacccaggctagagtgcaatggcacgatctcaagagtctcgttgtgtcacccaggccagagtgcagtggcacaatctctgctcactgcaagctccgcctcccgggttcacaccattctcctgcctcagcctcccgagtagctgggactacaggtgcctgccaccacgcccggctaattttttgtgtttttagtagagacgaggtttcatcgtgttagccaggatggtctcgatctcctgatcttgtgatccgcccgccttggcctcccaagttctgggatcacaggcatgagccaccacgcccggccaaaaaagctttttaatttgatgtgatcccatttgcccatgtttgcagttggttgcttgtacttgtggagtattactcaagaaatcgttgccgagtctaatgtcctggagcatttccctgatgttttcttgtagtagtttcatggtttggggttttatatgtaagtatttaatccatgtagatttgatttttttttatatggtgagagataagagtctagtttcattctcctgcatatgaatatccagttttcccagtaccgtttattgaagagactgttctttccccagtgtatgttcttggcttatttgtcaaaaataagttcattgtggatatatggatttctttctagtttctctgttctgtcccattaatctatgactctagttttatgccaggatcatgctgttctgattactttagctgtgtagtataatttgaagtcaggtaatgtgattcctctagttttgttcagtttgctcaggatggctttggctattctgggccttttgtgatatgacatagattttaggattgtctttttttctgtttctgtgaagaatagccaaagccattctttcttaattgatccactggtcattcaggagtgtattggttaatttccatgtgtttatatttagttttcaaaatttatgtctttactgatgtatagttttattacattgtagtcagagaatatactcgatataatttcagggttttttttttgcatattttaagacttgttttgtagtctaatgtgtggtctacccttcagaatgatctacgtgcttaggagaagaatgtgtattctgcagccattgtgggaaatgttctatgaacatctatttagtccatttggtctataatagtgagattaaatctgatgtttgttgatttttctgtctcgatgatctgtccaatgctgaaagtgaagtgttgaagtctccagccattattgtattgggatctctctgcctctttagctttagtaatatttgcttcatttatctgggtgttccagtgttggatgcatatacatttataattgctatatccttttgctgaattgagccctttatcattatatagtgaccttctttgtctcttttcataatttttgccctgaaatctattttgcctgatggaaatatacctactcctgctcttttttagtttccactgggatgggatatctttttttatctatttattttcaatctatgtctgtcttcttaggtgaagtgtatttcttataggcaacagattattgcatctttttttttaaatctattcagccactctgtgtctattgattagagaatgtagtccacttacaatcaattttgttattgataagtaaggtcttactcttgccattttgttatttgttttctggttgttttgtggtcttctcatccttctttcattccttcctatcttacttttagtgacagtgattttctctggtggtatgatttaatttctttctttttcttttttgtatatccgttgtatgtttttgatttgaggttaccatgaggcttccaaatactatcttataacccactattttaaactgatgacaacactgactgcataaagaaacaaactaataaacaggcaaaaagaagactaatgaaaattctgcactttaacttcatcctcctgctttttaacttttgattgtttctgtttatatcttattgtactgtgtatgtcttaaaaagttgttgtagttagtatttttgatcagtttatattttagtctttctgctcaaggtaagagtagtttacatggcacaattacaatgttttaatattctgtgtttttctatgtacttaacattactagtgagttttgtaccttcaaataatatctcattgttcatcaatgtccttttctttcagattgaagaactccctttagcatttcttgtaggacacatctggtgtagatgaaatccctcaggttttgtttgggaaaatctttatttctccttcacgtttgaaggatatttatgccagatatactattctagaataaaaagcgttctttttttccttcagcagtttaaatatatcctgtcactctctcatggcctgtagggtttccactgagaagtctgctgcaacacttactggagctccattgtttattatttgtttcttttctcttgctgcttttgggatcctttctgtatctttgacatttgaggatttgcttattacttgtcttgaggtagtcttatttggggtaaatttgcttggtgttctatatctttctcttggtttgggaaattatctgttacgatccctttgagtaaaaaaatttaccctttgggtaaatcccttttacccctgtctctctctctgcctcctctttaaggccaataactcttagatttgctcttttgaggctgttttctagatcttgtaggtgtgcttcattgtttttttattctttttattctctgactgtcttttcaaatagcctggcttcaagctcactgattctttcttttgcttgatcagttctgctgttaagagaatctcatgcattctacactatgtcaattacatttttcaactccagaatttctgtttgattctttttaattatttcagtctccttgttaaatttatctgataggagtctgaatgacttctctttgttaccttgaatttcactgagtttcctcaaaacagctattttgaattctgtatctgaaaggtcacttatgtctgtctctctgggtttgggtcacttgtgccttatttagttcgtttggtgaagtcatgttttcctggatggtcttgaggcttgtgattgtttatcattgtctcaacattgaagagttaggtatttattgtagtctttgcagtctgggcttgttgtacccatccttcttgggaaggttttaaatcggttcttggggtcatcaattccacgctttggctcttcaagggaattgagtgttgtgaccttaatcttcggcccctgcaaccataactgcattagggggcaccccaagcccagtaatgctgtgactcttacagacttgtagaggtgccatgttggtggtcttggataagatctgggagaattaattccctgaaattaccaggtagtgactctgctctcttcccttattttcccccaaacacataaagcctctctctgtgtgctgagccacctagaaccggtgtagggctgacacaagcaccctgtggccactacgactaccactggtactgtttggggtcagacctgaaggcagcacagcactgggtctctccctaggctcacagtaaccactgcctggctaccacctacatttgcttaggacactagagctccgcaataagcaggtggtaaagccacccaggcttgtgtccttcccttcaggacagcaaggtccccctggcctcgagtgagtccacagatgccgtccaggagccagggcctagagtcagaaaccttagatgtctacctggtgctccattttcttgagtctgagctggcaccaagccccacttttccctcttctttccacaagcagaggactctctccccacagccaccaccaccacgtccatggcaagtactgcctgtctaccactgatgctcattccaggtctaaggactcttcagtcagctcatggtgaatgctgccaggcctgggactctctcttcagggcagtgggctctcctctggcccagggcagatccagagatgctgtctaagagccaaagtgtggaattggtgatcccaagaacccgctttgtgctctataccactacggctgagctggtacctaaggtgcaagaccaagtccctctccttttctcaagcaggagaccctctccgtagccaccatagttgggaatgtgctgggccataccataagttagcatgtctctgagtctcacccaagacccatggcaagtactgcctggctactgctgctaattattcaggacccacattttctttagtcagcaagtgatgaatcctaccaggtctgggttctccccttcaaagctgcgagtttccttctggcagagtgtgtgtctggaaatgtcatccaggagctaaagcctagaatgggggccccaggactctgcccagtgccccctactgtggtagagctaggattcaagttgcaagatgaagtcctcttaactcttccctcttttctcctctagcagaaggcaggagtctctcctggagccgtgagctgcactgcctggggttgggggaggagtggtgcaagcactgcattagccgcccaacggctgtctcactaggttattaccccccaagtccacttactccaagcccagcacagcatcaagacttgcccagtaattgcagtccttagggcctagactacctttcaagtctgtttaggaccccagagcgctttagcctgcagtgccaaggcttggcagaactcaggttctgactgctgggatgggcaatttccctctggctagggctggtctgagtgctccctccatggactctggctgtgttctgcctggtgttgctttccaccatgacagggtggaaagcactgagttccagtgcaaagtctccaatcactatgctctccctccccaaggtgcacagattctgtctgtaccatgtgtcttcttcaggggagtggaggacgtgggagtggtggtgtcagcaaatcaagactgtctttcctatccccttcagtgcctttttcagtgatatgaagtaaaagtggttactgtgatcactcacctgatttttggttcttatgaaggggctttttcatgtgtctagtagttcaattcggtgtgcttgtggggaggattatcagtggaagcttctatttggctctcttactcctcattacgttttaagacttaagtggtcttagggccattggttgtatgatttagaaggctgtagttataagaataaagatgtttcatatgttaagtagattaactatttttttttttttttgagacaaggtctcactctgttgcccagtctggagtacagtggtgcaatcatggctcactgcagcctcgacctcctgggctcaagcagtcctcccaccttagcctcttgagtagctgggaccacaggcacataacaccatgcccaactaatttttgtattttttttttttttttgtagagatggggttttgccatgttgcccaggctggtgtcaaacttctggactcaagtgatccacctaccttggcctcccaaagtactggtattacagatgtgaaccactgcacccagccagattcactatttttaaacttatttctggaaaattaataccatactatgaagcttgatgtaaaattaatatcacagttttcagttattgagtctaagaaatggagctatgagtcagggaaagcaagggggttagagtgtacagagaaacataccagagaagagagatctgcatagcgtgaactccacgtatagttggagggttttccttaagtattgcacagagtattcatcagagcatgcatgtagggaactaccaaggctaggccaaaaggattcaagaagcagtacccagagcacactcaagagtgagaccaatgtttgttcccacccacaagattggagaaaatatctcataatccgtaggacattggataaggtatgcaagaggccattgcctctgttgtacagcacaatcagcatagagtaaatgctgctatagtcctgcctagcagatcataaaggcaagactcaagaggatcactctttccaagtaactatattccaatgacattttaaaaaattacaggaagggctaagcacagtggctcatgcctgtaattccaacatttggggaggcaaaggtgggaggattgcttgaggccgagagtttgagaccagcctgggcgatatagtgaaacccctacgcacacacacagagtgtaaatattagccaagcatagtggcacacactgtagtcctagctacttgggaggcttgaggccaggagttcaaggttgtagtaaactgtgattgtgccactgtactccaacttgggtagcagagccagatcttatctgtaaaaaagttttaaatacaaaaagtgtatttaaaattacaggaatatatatgacacaaaaaggtaaaatttctaatatctggaatccaataaaatattaatatgcatgtaaagaaataagacatataataaggaaaaaaattagttaaaaccagaactgacacagatgttagaattagcagacaaagacatttaaattattatagttgtatttaatacattcaaaagccaaaggaaaattgatcatattaagtatagctatggaagatataaaagaagacccaaatcaaatttctagaaaagaaaagtttaatatctgagatgtaaaatactctggatgagagtaacagcaaattagacattgcaggaaaccagacaagtgaatatgaatacacacagtagaaatatacaaactgaaaggaaaaagacacacagaattgaacagtgaattgtggggcaacttcaggtggtttcagatacatgtaattggattcaccaaatgagagaaaaacagggacagagaaaaaatatctgagaaaacaatggtcaacatgttttcgaatgtaatgaaatctggaaactcaaattcatgaatctcaaatgaacctctaagtacagacacaaaaaatgaggaaaccacaccaaggcacattataaacaatttgctgaaatcatggttaaagagaacatctaaaaaacaggacgacacatttcatacagagaaaaaaagaggaacagcagcagatttctcacaggaaaaatacaaaggtgtcatcgtgtaacagtatctttaaaatattgaaagaaaaatactattcaactagaattctttaactagcaaaaatatttttctaaaacaaagaattttccagaaatacaaaagttgaaagagtaaatcaccaacaggtacactatatgacatgttaaaggaaggctttctggtagaagaaaaatggtaccagataaaaatatggatctacataaatgaagataatcagaaattataattacttggatgaatgtgttttaaaattttccttatttaaatataaggttaattgtttaaacaaaaataatgacaatgtagaatggggtttttaagacatataaaaatatattatttttatatgacaataacagcacagaggctgtgaggggagacattgaaatacagatccctctctatttatgatggggttacgttccaataaacctatcattaagttgaaaatagtataagtaaaaaatgtgttgctaccaaacatcatagtttagcctagcctgccttacatgtgctcagaaaacttatattaccctacagttgggcaaaatcatctaacacaaagcctattttacaatatactgttgaaaatctaatgtaagttattagatactgtactgaaagtgacaacagaatggttatgtagttacttaaaatatgtttctacttaatgcatatgacattgcaaagccaaaaaatcatacactgaaccattttaagttgatgaactgtctgtaagtctatatactattgtaagatatacataataacaaaagaacactctaataataatacaaaaaatacccaaaagaggcagagtaggggaaagggaagaaagaacagataggacaacagcaagatggtatgttcaagatcaaccataacaatagtcacattaaatatatatgttagaccataaaaggcagaaatggtcaattggataaaaaaggcaagtcatggccagacatggtggctcatgcctgtaatcccagcactttgggaggctgaggcaggaggatcacttgagcccaggagttcaaggctacagtgagctgtgatcatggcattgctctccaatatgggcgccacagcaagtcccactttagagacacaagtaacttaaaagtaaaaggaaggaaaaagacataccctgctaacattaatgaagagactactagaatggtcacattgatatcagagaaagtagatttcagaaaaatattaccagaaatagagtcctttcatagctttaatggaaccaaatcatcaaaacaatgtaattattctaaatgcttatgcacctaataatagtgcttcaaaaaataagagaaaaatacatcaaacaacaggaaaaataggcaaatccaaagttatagtcaaagattttgacactatgtctcaataattaatagaacaagtataccaaaaaatcaataaggctatagaagatttgaacaatattatcaactatcttgacctaattaacgtttatagaacactctgcacaacaactgaatacacattttttttcaagagcacatagaacatttaacaggacataccgcattctggactattaaaaagtcttaaaagttttgaaagaattcaagtcatacaacatatattctgtcagcatagtaaaattaaattagaattcaatagcagaaagaaatctggaaaatctgcaaatacttggaaaataaattatatacttcttaataacacatggatcaaagaaggaagccagagagaaattagaaagtatttgaactacatgaaaataaaaacacttcctataaaaatgtgtgggataagaaaaattgtgagatgtcactaagaggataatttataacactgaacttagaaaaggaagaaagatttcaaataaatgacctcagctttcacttaaaaaaatggtaagagaggctgtgtgaaatggctcacacctgtaatcacagcaatttgggaggctgaggtgggcagatcatttgagcgtaggagtttgagaccagcctgggcaacatgactagaccccatctatactgaaaatacaaaaagttagtcgggcatggtggcatttgcctgtagtcctagctactcgggaggctgacgtgggagaatcacctgagcctgggaagtcgacgctgcagtgagctgagatcacaccactgcactccagcctggacaatgagaatgagaacctgtctaaaaagaaaacagaaaaagtagagtacagtagtctccaccccccttgtctacaggggatatgccccaggacccccagtggatgcctgaaactgagtatagttctgaaccccatagtgctgtagaggatagtactatacaccacaatggatctgataaccaaaatgcttactaagtgactaatacacaggtacatatacagtgcggctactgtgcacaaaggggatgattaatggtttgagtgcaatgaagcaagatggcacaagatttcatcacactactcagaacagtacacaatttaaaaagtgtgaattgtttatttcttgaattttccatttaatattttagactatgattgaccataggtaactgaaaccaaagacagcagaaccatggataaggggaggctttactgtaaattcaatccaaattaagcataagagaaataaaaattagagcagaaatcaatgcgttagaaaaaatttggtaaagtcatagaaaccaaatgccagttttcttataaagtcaataaaccattaaccagactgattagtataatataaaacaagacgtgtgaacattattaggtttgagagaggggacatcagtacagatttcacagatattcaaaggatgttaaggcaatattatgcacaataaatttgacaactaaaatgtaatggacaaagattttgaaagattcaaatgatcatattcatgcaagaagaaataaatagtgtggaaaccttgtagatattaaagaaactgaattatagctaaatactttctcacacaggaaactccaggtacaaatgacttcactggcaaatttgacttgtttcataaaaagaaataataacaattctacagacattcttccagataaataaagaggagtgaatatttccccaactcattctatgaagccaacattactctgataccaaaatcagacaaggacattagaaaaaaaaatttagattgatatccttcttgaattgatgtaaaaatttggcacacacacagatgaaagactgtgtgaagacacagggagaagacagccatctacgagccaaggagagatgccccaggagaaatcagcactgctcacaggttgatcttggacttctatcctccagaaatgtgagaaaataaatttgtccaagccaccctcaaaaataaaaactaataaaaatttagtgaattgaacccaacaatatataaaaaagataatatatcatgaccaagaagattttatcccaggaatacaatgtgactttaacatttgaaattgatcaatggacacatattaacagactaaaacagaaaaagcataaccatatgatcatatggtggacacatcacgttactgacatcactgatcagtcgcagtgacatcagtcacatcagtggacacagaaaaaatacttgatagaatctaatgtcatttaatgaaagttttatacacatttaaagagtactatttggggacaaatttgtcgtataaagaagtgcaagagaattataaagtacaacattcaggattgtggttacctctgagcaaagagggaaaggaatggcactgggttgaaacacccatagtgcttcaaagataaaataatatttttcttcaacacagtggttgatacacagtgtttgcttaaaccctttgtttgtttgtttgtttgtttgtttttgagacagagttttgcccttgtcgtccaggctagggtgcaatgacgcgatcactgctcattgcaacctccgcctcccaggttcaagcaattctcctgccttagcctcccaagtagctgggattacaggcctgtaccaccacgccaggctaatttttttatattttcagtagagacggggtttcaccatgttgaccaggctagtcttgaatgcctgacctcagatgatccacccgactcggcctcccaaagtgtaggtgggagccaccacactcagccagttgttatcctttataccttacacatattggtattttttcatgctttaatatttagtaaaagcaatttttaaagctagtatttctgttcttggcctttttctgaaattatcataccagaaagacatttatttcctgtatttacagctttggaaactcataacatttgcaggttgaaagaagagctgtttgtatgaagtattcagttttttttagaaatatagtgtgatttttctataaacagagggaactggtatttcaagtatactacgtgaagaacaagagtgtgattagagccaacaagccaaaaaatagagaggaatcactaccctagtggtcagttatatataaccgagagaaagacagcaaagtgagactagcctgctaatcatatatttttctacatttctaaagttcattactcaaaatacaagtgaattatatttattccaaacagttctgttacgttttggtctttatttagacctgtcccagaattggaccccaattaccttctcctacccttccttgctaggaacttgtctgaaaattctgccacaagaattttacagtgtttaaatacatttacactacaccattcctataattatatatatctcacaatgaacagttgtctcattcatgagtctagaatcctttgctgaatggacatgcccaaatttggtgtcatttatttattcttacacatgccgcattcactcagcagacattaatgagtacctgagcggtgctagacgtggtactaggctaaaatggaaaaacaagacaaatgccctgctgaaggtgtttaatgtgaaacagacccgtgcacaaataattgagatatttgcaattcagaagaaatagtatgtgttacttagattttgtacctaagtacaaagttgcatggcctacttaaaaaccttcttctatagccaggtgcagtggcaccggctgtcattccatctacttgggttgctgaggcaggaggatcacttgagtgcaggaatttgagtccagccagggcaacatagcaagatccctgtctctaaatttttttaataaataaaaatgtttaaatttgtataatgtaaaaatgtttaatgttgtgtagtaaggtaaaattctatttaaaaacaataataaaaaatatttctgggctgggtgcggtggcttacgcctgtaatcccagcactttgggaggctgaggcgggtgtatcacctgaggtcaggagttcgagaccagcttgaccaacatggtgaaaccccgtctttactaaaaatacaaaaattagctgggcctggtggcaggcgcttgtaatcccagatacttgggaggctgaggcaggagaatcacttaaacccaggaggcagaggttgcagtgagccaagatcgcaccattgcactacagcctgggcaacaaaagctaaaaaactccgtttcaaaaaaaaaaaaaaatatatatatatatatatatatatatatgtatgtgtgtatatatatatatatatatatatgtatgtgtatatatatatatgtatgtgcatatatatatatatatatctgatgtgctagagtacagaaaagctggcaaaagtggtgagatgtgaaaggctatcataatctatttgtgaacacctacttctgttaggtttcatgataaatttttacatcaagttgtctcatcctatgaggccttatctacattttacaaataagttcagtaagcttgaaaaaagactcagtaattaaatcatactcacagatgtaattagcatcagaatccagggccttttaaggtcaaagcttgggatcttcctttttattttcatgctactcccttccccaggagtaaaggtgttctaggtgctaaaaggcatttttgctcctcccagatcaattgatgcaaataattattcacctaaaacctttattgtctttatgaaccttcatgtctgtctgaccttccactcttcctgaagcatatctttttcttaatgaaactatttaacatattttattctaacaaatatgtcatttgtatctcctcattagaccatggggttgagtatctgattcttttaagaaaaacagtgtgtactgaatggattaaaacaaattaacaaatttatgaaggaattacttggattttccaatattctttaatgagctaaagatgacagtgtaagaacatatgaaaagtattggattttcgcaactttcaatttaagactttctaaggttcatagagaaagaaaaggaattttaaagagatcactgaagagttgtgaacatatggatagttggataacgatgaagggaataagccctccttttttaccctatgtcaccatggctgagagatgcattatgatattggaaaaaaatttcagctgctgagttctgattagctcactctcagagctgcagcacattcgagatggaacacagtgcttttgggaaagcttgctaagataaatgagataaatgtttgcaccattatactaattccctagcccccttttcagcaaaagccttgttttgtgtgtgtgggtgtgggtgtgtgtttgtgtgtgtgtgtgtttcaatagatggaagaattttttaacacatgaaaactcacattgctgaaaactcaaaaagtcttcctaagcagaatcattatgccaaattgtcattgacatacgaaaacactatagattaatgcagtaatagttcatggttgctcaggaagaaacttaatttacaatttgaaacaggtttgcattccttagaaattctggaaatcaatcagtggcacagaaattgatctgctaaaggagaggaaaattgatttttaatattggcaactacatcaatttttttaagttctgaaggaacaactcttgaaaacaaatttattaactgttaagggattacttgatatttagtttcctagcaaactatccaaagagaagtatttatggcctcattagaagatgtatttttattgtgccaaacatcaacttcaaaattgcagtctctattatttcaaagatatggaaatcaaaaattaaatgaaatggagttatctatataagactaccattgcatcatattttagagtggtactttgcctcaaagtatctcaatatgaatagtgagaatctgaacacatttgcatattccccattcgtgatatagtgttggcattctaaaaaagaataactgtagctgatggcaatttttatctgaagagacttgtgcatgatagcaatatacaatcttctgtcagcataagaagagcatctggggcccattaactcaccaaatctgccactgttctgcaaatttttattaagcaagtgtagtccctaatagtcacttatgttatagaatgcgtatcaaatgctatcaataagcaaggggattgttttcccccagtgagaatgcatttgaagtgtataagaaagcttgacaaaagaataaaacactttaagtgatcactatattaatataaatgtatcctactgggaagccaatgtgtgtaagtattatgtgcactttgatgtttgccactaactagttctcagagtgccatctttttcatagattttttcccctgtattttctttctctcaattctaatgatgaactggttgaaattaagtgaaaagacacagactgtttatttatgctttttaaaaagatgccattgatgctgggcagttctaattagcttcaaaggcttacaaccatgagaattagaaacataggccatcaggctgctgtttctcaaacaagtcttcctgaatcagagaacacaccaggaaattaacaagcatccaagccaaagagtgtcctctttattaagcaccttatgataattaggtaaaataatgtacatcaatcttgaattgaatatgaggaagcatgaggttagtctagaaatcctattatctaaataaatcggaagaaagatcaagaggaggcagtccatggtactctctaagtatgtaataatggttataataaaataacagttataaaaatatttatgaattgcagcttcagaaacctgagcatttcattggtatctcttcaattattgtaatatccatttacgataatcaagagcaagtagtaccagtccttgggtaaaactgaaggataagaaagggaatgaaataacctttaaatacaaatacttttttaaaaaagaaagaagaaagaaaaggagaaaaaattctgtcatcagaacgagaacaagaaacttagactcttgctccatcaacactctcttactcaatgcttttaattaatactttactgttttggaatcaaagacctttcccacaccaggcccatttatttttcaatctcttgtaaataagtcctttgtttaaaatgacacacctgtcacatttcatatcactaccattccaatcactgtgctaaatattatgcagtgaaactactagacgtaagcttaagccccaagagataattttaatagtagctctaagttaatgtgagttataaaggaagttggtattaattataacacttgccatttaaaaaaaaacttggtggcatgtgtaattttacctcattttctcatttgctactgttatttaaattacttcccagcactaagcatgtgtataaaagatgattgttccaaatttaaccttttaaataaaatgtattctatcaattaagtcattatagttccctctcttttccattatgtttattcatttatcttctgtcctaaagatagacatctgtgtcagtgaatatttcagagaaaggcctctaatttttatgcctatcacccatttggattttctacaatgtttttcaaatagtttatattagtgtttgatataatttcaaattgtcaattaaaataatgataagtataagaaataataaatattattcagccaaaaagttaagaagataatttgttaagcctaatatggccagggaatttgcaagtacttaaatcagcttagattttttaaaaaagataaaaacaaagcagcaaaagccttacctttgtatgaatcccttcttctgaatgactatacataataaaaccgtacagtctagtgtactttcattgcctttcttccactgcaggatgatttaggagccaggtaaattgctaggtcgtatcttttgtggttgtggaatgatccatacaataacaatgtaaaagtacctagtgcccggctgaagcatagtatgttctcaattattttctctctttagttctttataatcctgagcaaattaaatcacgtaccccacaaccgtcatcaaatacaccacctttaccactctcacaacttccatttatcaaatgttttcatttattgagaattatgtgtctggaactgtgcaaagtgcttttgtacattttttttcatttagttccaactctctgtgtactgttttttcccccatttctcatatggagaaactaaagctaaaaagaacttagtggccgggcgcagtggttcacgcctgtaatcccagcgctttgggaggccaaagcaggcggatcacctgaggtcaggagttcgagaccagcctgaccaacatggagaaaccccgtctctactaaaaatacaaaattagcagggcatggtggcacatgcctgtaatcccagctactcaggaggctgaggcagaagaattggttgaactcgggaagtggaggttgcagtgagacgagatcgtgccattgcactttagcctgggcaacaagagcgaaactccgtctcaaaaaaaaaaaaggagcttagtaacttgcctggtaatgctggcattcaacccacatctgtctgattactagctatgatgttagtctctctttctattttgtttctcattaatgatgatgacagtagttcatatttattaagtacttattctgttgtcttctaagtaccttgcatatatttgcacatgtaatcatcaccacaaacctgtggggtaagcaatatcctcttatgatgagactgaggccacagaaagttaaaatgatttgcacaaaactgttgtttccaaacaaggattccaattcagaaagattatttctcatctgtagaatgagaatggatattttagcttgaacccatcagaatcatcaatttcaaaacatgttaaacaaaattatagctaacatttagtaagcttggtcaccacagaaagataactattaatagcatatattcaaataaagagagtagttttccagcatatagttagttgcgttgtcttatattccaggtttctcaggtaatgactcttctgtgactcttatcacaagtgtaatggagtggttaagagtgccatatttaagttcaggcttctccatttatgaggtgtatgtcagtttctttatctgtaatataaggatagtaataataatactttccaggtcgttgtgagaatcgaatgaatgaatagatacaaagtgcatagcataaaacctgtgtattacaagtactcagaaaatatgagttcctatggttatttttaatcattatcattgttttctaatgcttttctacttacagtgtagattgattctatgtaagtgctttttaggcctgagaaaaacagaatttggctcacaactggtgccttataaatacttacctcccaactagaaataaaacaaaaagtctaacaatatttttaagcagttgggaacagaataatcacagatatgtagtgcttttatctagaaaataaagaaatagcttagaaaaggagggctaggtgggagtgggaagattatgtatagtaactgggtcaattaagactgaatgttgtgggcagagaaaaaaagggacatgttactctgagatcaatctagtgttaggcgaaatggaagagattcttcttgttagcaaatttcccctcgccttgcttcaacccttgagaccacagttttgtgtactaacatagacagtggcacatggtaataaacagcttttgttgaatattaaagtgatgatctatgcagagatgcttaaggattaagaactttgcatctgtgttcatgaaggatgtgggttagcagttttcatatcatgtatttttctgatattagttagtatctgggtaacactagcctcatagagtggcttgggaaatcctctctctttctaatacattttctgtagaattggtcttatttatttcttaaatgtttggtagaattcaccagtgaagccatctgggcctagagttttgtttgtgggaaagttttacttataaacacattttttttttcaaaaaactactatagggcgacccatgttatctaattcttcctatatgagcttcagtaattgtgtcttttaaaaacgaatccgtttcatcagagctccattaatctagagttagtttttccccgctgttgaggcaagacccttcttcacattcaaatggatgcccttcagttatgaagttttctactctggctgttggaaataggcactattcccagccctgtgtgaacttcggatgctgttcctcttccagtttggaatggttctttgccaactcttgggttaattttcttacacacatatgatcatcagtattcaactacatatatgaggagatttttctgaagatagtattgctctttcctctctggttctctgctctgcaacctctgtctgctttggcttcctgggatgcccagcaccatgccctcaagctggggccatcactgttctgcttgggtgttggctttcccgcacggctgcctggaggctttcttcagagaataagctggggcaattgtaaagttcacgtcatttgttttccatctcttgggatcactgcattttgttgcctaatgtctaatctgttgaatgccattgtttcttgttttgtctagtttttaaaattgtttcaaggggaattacaaatctgttcccttttactctattttgactagataacagaagtctaattcttaagtatttaatatacacacagacacacacacgtattgctgttatgctgaaagaattttattatattgtatacatccctgggtctatgaatttggtttctcctcttgtaaatgtggaagaaacaacccagttaaaataactgaaagtattgaaaattatgagaaaatgaagttatgttcataaaagatctaataaacatatatttattcatagctgtcttcaagatatctaccaataaaagtgaggtatcccagggtaggctgggagaaaaaaatgtttctcaaatctctgccagtaaaagatttaacttattatgaatctgcattaatttactgtttaaaaattgtctgatttacaagccggtctgatccttgtctcttttatttcttctcctcagtgccagatgaaagcaaggttcactcattggctggacaaaaatcgggtaagaaattccttgtaactgactatattcctcttcctggaaatcactggctgtgttttagtagcagttggaacctgtttctatccactagtcactgaaaggctttctaattaatacatgagatgtctctgacttccacaaagatgacttattgcttggctgtgtgtatagtggcataatgtatgctgactcagaatgtttgggaggaaagaataaagatttccaaaaagatatataaaaccaaaaatcttaaatctgtactctagctaaacacttaaaaaaattgcaagaaaacccaagaaagttcaagattctttcccatgatgactttcatatttaagtggcgggacagagaattccagaataagaaagatacgatcatttttttctcctcaaaaaagaataggattttttttcttttttttttttctgcctgtcatcaaaatggattgttccagggatgtatgcattatttttatttagagacatgaatgagctccctagatattctctaggaagtccacaaaaatttctaaggatctcttaggtctttatcatgtgtgagttaccttcactcctaaaatccaagctgttttttcattgccaagtcgactgccttctattcctttttccttcctccatcatcatttattcacattagttgaaaacatttaaagctactaagctagcaaatagtggagtaatccctttcctctaggggcacattgttttggaggagaaaatgtccattttgctcatagcattgcccctctaaacaacagaaggattatgattttctgacatccctccattggtgaaacaaagaagtctttcccatcaccaagtgtctcccgtgtttgtgtgccaattatgttttcagcagtaagtggccttgatgcctcattacctccatcatgttccagggcaagattatgatttttttcctttcttctttctccagattctcttgtgataacagcagggaagggctggttcacaactcttagatttttttttcttgcttttcctaataaaaagcctaagaagttagatcactgtgaaagagatttctatgggagtgataaattgccacatgctccttgctcccaacatcctcttccattaaattctctactactggacatatttttaggagcttcagaaggaagttctcatgaccagggaaccccaaggataatctataatatcttcatcttaaatacattctactgcttatagttctcttatacatattgttataatacctgaagatgaaaagccttttcttagtactgggataggcttcaaggcaaaaagttgaagtccttttctggaatttttatcaatttggtttttgaaaatgagcaaataataaattttctggctttttccaggaaatcaaatcttattctaaccttaatttccaagcacactactattaggtggcaattaaaagtttgtcactctttttagatgagaactttgtcatctttgtatattgccataacattttatgtaaatttcaatgatctgtctttacatagtatgatataaaatattaataaagaattatgctaagtgcaaaatttgaaataataatcttccaaaaaagttttagtcaaaaatggcagaattttaaagctgtcacacaggttcattgcaaattccatacagcaacttcactttagctgatagaaatagttccaacagtctttatgtcacatgaaccacactgtttaaatacttctgatgttttaaagaatatttctgttactaattagtactgttattccaacatgcactatttttatatttttaagtgctattataacgttattactacttcacgtttttcattgggcatctgtagaaatgctgaaaaataaccagccacttgataactttggagcaaaagtggcctgcaatgaagagggctaaacaatcaccaaaaaccatatactgtagagtcacattaaatgagagcatcttgtaaaacactagaaacggttctgagaaagcacagagcagcattagaggaacatactcaaataaggttcaaaatttatgtactctaagaacatacccttccccattttttgttttttgttttttgtttttgtttttgagacagaatctctctctgtcacccaggctggagtgcaatgccatgatcacagctcactgcagcctcaacttccctggctcaggtgatccttccacctcagcctcccggatagctgggactacatgtgcatgccaccatgcccagctaacttttatttttatttttattttttttgtagaaatgggattttgccttgttgcccaggttagcgtcaaactcttctgggctcaagcaatccacctgccttagcttcctaaagtgctgggattacaggtatgaaccacagagcctggccactcccccaattttttacatttctttcttttggaaaattagtcttgaattataatgatcctcaggaactcacccctcacataaaacatagctcccctctgtgcgttgcatttacgtgaagggatatctcattgggatttggtggtggtggtggtggtggtggtggtggtggtggcggcagcagcagcagcagagggttaagggttctcttgattctaacaacctctttcagttacaaaatcattttttaaattcatttaaattcacctgtagtctcagtcggctacaggtcatctgtgaccactaagcaagttaccaggttgtattttaacttataaatctctacttgtctcaccattctttttttttttttttttttttttttgagacggagtggctctgtccgccaggctggagtgcagtggcgcgatctaggctcactgcaagctccgcctcccgggttcacgccatttctcctgcctcagcctcccgagtagctgggaccacaggcgcccactaccgcgcctggctaattttttgtattttcagtagagacaaggtttcaccatgttagccaggatggtttcgatctcctgaccttgtgatccgcccgcctcggcctcccaaagtgctgggattacaggcgtgagccaccgcgcccagcctgtctcaccattcttaaaaggaatcagttaacttctttttgttgtgatattgtccccttttccaaattctttcttcagaatatttaggttaaaataagagtttttttttttttttttttttgagacagattctccctgtgtcacccaggctggagtgtagtggcacgatctctgctcactgcaacctctgcctcccagattcaagcaattctcctgcctcagcctcctgagtagctgggattacaggcatgtgtgtggtgcccggctaatttttttttttttttgtattttttttttatgctaagagtctctcgctctttctctttaactatagaaatgtgagcagcttttatactatccaagaccaacaggaagttaaacaaattaaattgtatatactgacctaaatctatcatccagcctcttattcaagatgacattcaacattttaataaattcatctgagttaaaatttcttgagtcagctacttagtctgtaaagagctatttcgtgccaagttccatctgttggtctggcttgggtacctcccaaatttgtgacaatatttttggtacccttttcttggcttaatttttaaatggttgatccttcggagctcagatccaatcaaaggcccaggtaaaataaatctttataatatttttgacccaaaaatgtagtgttcccctcaccccttctggaattagtccagtattcttgagatttctctaacccctatttcaggggcttccccaaaagggcattgtatctcattaccttggcaaggaagatagcaggatgattctcctgtttctgagttggtagaatcctcctccaaatatgagagacatttaagtctatggtatggtgagacctgcccggagaagttagaaataaaataccctttgtttggttccttgaagaaaaatcacaagtttcatagagccttgaaaaaccaaaaacgtctttaacctctttccttgtttcactaattgaactctgacaaaattcaaattctagcaatgcctggagaaaaaaaaaaaacagaaaaatgtattttttaacagtaaaaccatttttaaatgatttaaatattctgagggaacattaggatccagagaaaatgacatcaaatttagcacagctttttttttattgttatgctttaattttgcttatactcagggtcttaaagtgtgtctttaagaaggaattctttcttattttctttctgtctactaaaatgacacttcaaccaatagtttaatgctcctttatgttcagacagaaagggcttataaattttactttttttagtgtcttcttttttttttgttttgatttactgcttggaactgttttaatatgtattgactgtctgcagagatctttgctgacccagctctttaagatgatgcagtactgaagaaggccgatgagttcttctttatgagctctgacatattaattagcaaaatggactaaaaagcttggctattcctgttttaatttcttatattctcaaacacctgtccatatagctgtaaaacaggcaagtgtgtgaaagtaatggttggcagcaagtccagaccttttctgagacaactttatcaattaatgagcaagtactcattaacaatctagggagctatttctatgtgaggccactaagtatgtttggtatcctaacacagtttgatgaaaaaactgaagctcaggtaatttaaatacttgatctcagctgggcatggtggctcacacctgtaatcccagcactttgggaggccaaggcaggtggatcatttgagatcaggagtttgagaccagcctggacaacatagtgaaaccccgtctctactaaaaatacaaaaattagctgggcatggtggcccatgcctgtaatcccagctacttggaagcctgaggcaagagaatcgcttgaacccacaaggtggaggttgcagtgagccaagatcacaccactgtgccccagcctgggcaacagagcaagactccatctcaaaaaaataaaaaataaaaaaataaaaaacttgacctctcagctggtaactagtttggggtaaggatatgaaccccagcattgtatggtggagcttatgctttggggcaatttatatttcactagcacatgccttatgaaagacacagcccctacatgacacacacacatatcaagctatctgatacatctttacttgcgttgtgtaacctcagccagctgaactaggaacacaatagctttaatttatctaccaaactactgtagttccttgagtatgagagggacatctaatctgatcgttcttgcctttgtttccttacatgtatgtgtgcatgtgtacatgtacaggagtgtgtgggccaagttaagagctgtatgagagagaagatgtgcatgtgacgtgtataaattataccaaaggcacacgtgcaggtgttgtgtatccttataacaaaggccaagagtttagtatgcaagttactacttcagcaggccttacattttgttctaaatgcaatgtgtataaacctcaaatccagagtgttcaaatgtgacctaagaaatttctagatccttgcaaaagaacagagcttttaaaaccatagggtgattggatagtcactttaattcaagagcaatgagttattaaatgacatttcataaattgtgttgagtcttattattccatacttttatagaatattaaaatttgaatgtgcatttacactttggaacaccagttatggccatttaaaaaatatttgcatcttctaattggattgcaaattttcatgaatttttatggttattattgatgaggagctaaaattttcaagttaatggttagtgtacttgaactcttttctttcctcatcgactcattaagatatgacagcatggttctctatttggacaaacatctttattggatgctttctaagcttttgtcatttgttttgttggataaatatagcattagacacaagaaatatatacatttctcacatgctgcagccttggtttatatttccatgggattcaggaagttgtcataaagaagttagcaatatgtctagcgttcttcctatacaaagttgattgtgaagcaactctagtatttccacatttgcaaaaaaaattactgaataatgtggtctgtaaaattcaatgaattaaactgaattagaaacaaatatatcagtcttttccataaaattctttactcctcaaatatggagcaggtgtatgcatctctaaaattcatgagtaaataaagagacaacatatgtttccaaatcaagtttcaaaataaattattttagttccactcatgtttattaaatgcccactctacacagatattgtgttaagtgctagagatacaaagtaaaataagacaagttctcagccttataaaatgtttataatatggtagaggagaaaaaatacaaatgcctaattcagtatttgtttgacaccctcatgctaaagagttcaatgcaaaaacctcacagaggaaatattgcttaattccatttggaattggggatggctgtcacgtttcagaaaggatatgcttccatagcaggatctgaaagcaaaatagaaactggcgatacagaaaaggtcaatgagccaacacatttcaggcttctggaaagttctgagaacatgaaacatcatggtatatttaagaaattttaagcagttcagtgtggcagcagtacaaagagaaagtgacaagataccaagttaagccaagtaggcagagattagaccatacagactcacaccaaatgaaaaagtaccattttatcctgtaggctcagataatctaaacagattaaataagaggtcacttttatattctagtaatatcaatcttttggttgtaggaacctgaagggaccccccccccccaccaaaaaaaaaaaaaaaggagagagagactaatagtccatataagagatgatgttggcctaagtgtcagtgattagcaatggaaggggaaagaaaagtaagaaatatttaggcaagaaagctttgagtattttttttaagttaaacttaatgggtaagtaaaaaagggtatccaacttgattttcattgtacttgtcagctattgctgcaactatgctgcataataaaaccaacagtaaacatttatttcttgatcacatatctccaggtatactggaatttgctggtatctccagtgtttgggtttagctccaacttacaggttaggaccagcttttctgcaggtgttgaccagcaatttcctgcggcatttacttcttgataacaagagtgagaagatagagacagggtagatagacacttaagagtaaaatgtattaacacaaaggctctggccgcccccctacaaaggaggccatggaaccgatggaactgatggaggaaatgctgggactgtgggtcagtgctgacacacccatggccatacgtttggtcttcttggccttggctgggctggtggatgggaagccagtatggatcaccttgtggatggatgcaaagagaccaaacttggcgggcactggaagtacctggggaagcaggagagactcacactgctgtcatggccccacagcctggagcctcccctgcctcctctgcctcttcagagcccagcagaaagacagagaaagaagcctccttggggttccattacccacactccaaggtggaaatctttcagatggttagatgatgaaggtagtagaaggcaaggatgattgggagtagaaggaagagtgacaggctagcatgagctgtgcagcagcaagattccatatgagcaaagtgcagaaagtgagaaaaaaggaccaagttggatctcctcctaaccctgacctgcatgatatgggtgtgagaagcttcaattgagaaagctgctgagaaagtagaattcatagtggagaactgcatttcaattaagaaaacaaaaacaaaaacaccacagaggtggtttgaaagaagaggttgggttgaaaatgaacagtattttgtcaaccatggaaggatagttggactcaagaaggcaaggtagaagagtctaggatagaggggagaagtaggacagcaagtcacgttggaagacacacagagtggtatcattagttgtagagaaattaaaaaaaaaaaaaaaaaaaaaaaaagctgagatgctctgattctagtgaccaagggagattataagctacctacttgcaagacctttcattttaaacatctttggaaaatctagtctgccaggattcaccaaatggctgtctagccattctagcaatgttttaaatcttaagttttttcagctaaatcgtagccgacacctcatattggaagtacacattaaatactcaacctggaaaatctgaaggtgagctcttacataatggacctcccagtctatgttgaataatgtatgtcaagctgaaattttatttctaaaatctgataaagttataatattgccagctaatgttgagaaatattttaggatgtattggttttcctaatattgctattacttcatgtaagatgaagggtgtttaggtgtacgagtttcaaacatgaatactgtttattggaggtaagaggaagccttaaaagacatatatttcaggaatagtattgcctccttacaaagcactcttttgttcctacattgaggctccagtaatgtgatgaatttcagtattttattttattttattttttttttttgagatggagtctcgctctgtcgcccagactggagtgcagtggcgcgatctcggctcactgcaggctccgccccccggggttcacgccattctcctgcctcagcctcccgagtagctgggactacaggcgcccgccacctcgcccggctaattttttgtatttttagtagagacggggtttcaccatgttggtcaggatggtctcgatctcctgacctcgtgatccgcccgcctcggcctcccaaagtgctgggattacaggtgtgagccaccgcgcccggccgaagttcagtattattaaccagttatacgaatgcttccatcaccttgtcatgacctgcccttccagccttgccttttgccaccatcaccctccatctacaggttcccaactcccagctagtcacagttactctctgaccatattttgcccttttatgcctcggagccccagctgaactcttgaagacgcacctcccagggaaaccttcccctgctttctcaggcaggctctctcttggtgcccaggattgtttaacttcaagtgtctctaggttctattctttcacactttcttgcctcaactcacacttctgctccagagccagtcagttcctgtaagagatagggagaaaaacagtttttttctattctcacacatacaacacagaatactaagcacagcacagaatgcttcaattctggtcaccaaaatgtgtatggtttttccccacacacactgaccagttctccagtggacagcaactcggtgtcctataattcaattcaattctgacactatctacctggcgatagagtcagaatccacagattaagctcttagttccacaagcctgtcccattcagaagccagtcccacgtcctaagttgtgacttgggcctctgaccaacgagctgtaattcacagttcccatgactctcctcaggttcaattaatattctagagtagctcacagaactcaggcaaatgacttacttaggcttactcatttattataaagaacattgcaaaggatacacatgaagggctggatggaagagatgaatagaacaaggttgtgggaaggttctaggagcttccatgcactctctccaggcatctccgtgtgttcagcaatctaggagctttccaaaccctgtgctcttgggctattatggaggcttccgtaagtaggtaggattgattacattattggccattggttagcaactgaactttcagctctttttctctctctccggcttagagggtgggactgaaaattccaaccctctagtcacttggttgattcccttggcaggcagccccaaatcctgaggctattcaagagctcttgttcatcagtcatcttattaacgttcaaagatacatcactttggagattccaagggttttaggagctgagtgtcaggaaatgagaggaaaaccaaatatatattttatattacatatcacagcctcaaagatccctctcaggatgttttttttaaaaaaatctcctttgatcaatagtcatggctcccttatattattaatattccccaaatccagctttttttcatacaggaaggaaaactcttatctattgcatagagtggggcaaccaatgataaactcatttagtaagctagtatttattgaacatgtaccgtataccaggctctttgccaactgctacaaatacaaagtggtatagaatatggattctgcccctaaggttctcacagtttagtagcaacaataggaatgcaaacagtgacaataccatgtgcttatgtataaatgcaaatgcacagaaaaagtaacagtggttatctttattgaagaggaagattatggttgggggtcaaagggaccttctgctttatctgtagtatttgagttttacattcagactatatttaatgtactatttaggtaacaaataatttatggattaaaaaataacatttttaaacttaaaccatcacatacaaaacctagtaatagaaatattgtacaaatggaaagatctagcatggggactggcaaagattatgggcagaagaaccacaggaaaagggagcttctagtttctgggaaggagatgaaaggctgaatcccggagtcatactggaaacctatttgggaacctatttgcagcacagaagtattttggaagaaaagagaatagagaaaggcttaaccatgagacctgtcatttatgggttgctggaaaagaaaaaagccataaggaaaatcataattagggaatattaaacccccttgtcaatttttggtatcctagagggcaaaaacttagtcctagtaatttatttaataaggtacccatgcaatgccatgtacaaaaagtccttttttagaggcccatgatgcccaactgtatccaataaaaacagacttataattagggggttaatgaagaatgtgtgaaatgaaagagaaaacttaaaggaacctagattacttctccttgctaaaataagcaatgcagaatcattcccactctactgataattagaaaccgcatacccctacgaaacagcttacaaatttcaccccatcaaaagagaacaaagccattcaaagttaccttttgaatgaaaacacttttattagccaatcagttttttttttaaaccaagcaaaccaaaccacaactgcaaaagaaaaaaaaaaagacagtttggttttagttttgtaaaatatcatggcatgccctcagtgagctgtgagagatatttagaaatactggcatcaaactggtgacagagacattttactgctgcactaacaggcctcacagaaatactactgtaggttgatttagtagtctggtggcccataccctattttaaatggtttatatgggcaaacattctttattttgaaaaattatatatttaaattaatgtacattagtaaaagactgatttttcacttacagcgctgctacatgtttttcgcaaataaaatttttgttcaaaaactgagttatttttaaggaaataagaatataaaatgctatatgaaaatggcagaatattataaaatggtaacactaattgttgaggtttgaaaagcactgattaattctgtaagcttctatcagcatttccatagtttctgtcatgcttctttacaaagttcagggaatcttagtttgagcaaagagtctctacccagaccttcaggatacattaacaatgacctacaccctgggtgccttttcctgtccgtagtcaaatgccttcatttctggttgaacactggcttcttcagtgcaagaaatgtgcaaagcttcaccttttacttactataaacttctctcaataaactctaacttgagttatattttcaaatatagtcccccagcaggccatttcattggagagagaaacataacagatgcaatggtacacttccatgtgggcctggaaagccttaccagatgcagtcagctttgactttttcctctcttaagccctgacatttaccagcaggaaatcaggttgatcccacaagaatacatcccaaagcctcactttccaccctttcccgagccaccgtcacctggagagcttcagtgaggaaaactctcctcaggcctttgcacatgcattcgattagcccagagtgatcttccactctatacggctgattcactctgattcaattctcaggtcaaatgttctttcttcaaagacaatttctgtgaccaccctatctaaaatagtcacccaacaagaagccagtttctctcaccttactgtttacctccttatagagctaatcacagtctgtagtaaatgtgtgtgcatttattgatgtatgtaacctactgtctgtttcccctacctccagaagtgagcttcatgaaggcagagactttgtatccccagttccaaaagcagtgtgtggcacacggcaggcatcctttacgtagtacttgctaaatcttttttcttgatacgtctttttgcatatttttgctctcaaactttgtgtccttaagctttatgtgtatgtcttgtcctaataaatagctggattttgttttgatgttcaatgtgacaacctgaattgtaactggggtttaacacatttacatttattgcaattactagcatatttagatttatgttttattttcagttttaaatttggactactttttaatgaccttttttccctctcttgtcattttaggctgaattgctttttaatcccatttttttctgatagtgatttgaaaattatacactgcatttttggcatgcatacctaacaaaatctaaaattagtctgtatctaatccttctcccaaacaatacaaggaactgagaaccctttagctttccttacctgcttccaatttttatatgatttccattttgttttctttcttattttttggtcccgcaaattatatattaatttcagtgttttatgcattcaatatttgttcagacttctccaagtatttaccaatttcttaactcaccatttttctttgaatctctgaccttccctcttgggtctttttccttcttctgaagtatgccttccagacattctttaatgctagtctaatgatgacactgttttgtttattagaacatgtattttccttggcaactagtttttgttgggtatataaagttagacttatagcacattggagatcttcttctattgtcttatggcttctgctctgaaaagtcagccatcagtctaattggcttctctttacctttgataagtcttttatctctggttactcttaaattctctttgtccttgacgttcactttcactacagtctaggttttggtgtagatttctttatattatccttcttggtatgtggtatgactcccatggctttatatcaatgttttttatcacttctgggatattatggctgttactatgcctcttgctcattctgtctcctctttgtggaattcttactatttagtaaaatgatttttaggccatactctctcaactgtatgtgttaaatcctttttgatatttttctgtcttcttgactctgcactccattctgagtacaagtcgagtatctcttatctaaaatgctggagaccagaaatgcttcggatttcaaatttttctggattttggaatatttgcatatacataatgagatattttggggatgggacccaagtctagacataaaattcatttacatttcatatacatgttgtacacataggctgaagataattttatataatatttttactaatttgtgcataaaacaaagtttgtgtacattgaaccactagaaagcaaaggtgtcactatctcagccacccatgtggtcagtctgtggttgtttggcaccaccatcattcccaactctgaatttatatgctaccattaggtagtcattttttatacttacacacatgagtagttaatgacaaaaaataggaataccattaatacagtaaaaaataatgtgttcaggtaaaaaagcagcacagtggcatcaccagaatacctatgtcagctgctcagcaacagcaacaacaaacagtggcatatgaggtcctatgtggaactttccacttatagcatcatgtcagtgctcaaaaagttctggatttaggagtatttcagattttggattgttggaatagggatgtacaacctggactaatttctccagacctatcttctagctccagtttagtgtctaaatctcacatctctgctgactctcattcatggtgactttttctttataagtttggtaatttccatttgggaggtcatatttggttggctttaatgtatgagaatcttggggagcctgatttgcatgtgcttttcttcagagaggatttagatttgtttcttctggagtactggcaggacactgctaacctgggatcactttcatataatttcttggctgacagtttaattgattgggagaaaataaacttgatttaatacctctaagaggtcagtattatggttgcaagttctcaaaggaatatggtgattttttttaattgttgtttttcctatctagagccagagatgagacagattttcttagactggctttgcttaaggaaatgtatcagggggatgaggcttttcagcccagtcttctactaaagttgtaggccccttgagggtcactgctttaactctcctgcttttgactttgactcccagatcctccaagataccaccattgtgtcccctcccaagctccaggttcctagattcagcatttacctaaaaggcaatctcaaattgcaagtttgcttgcctaccatcactcactgttggttttttcacttgtttttttgtttgttgaagggctttcctttaggatttcctttaatttcctatgaacaaatcaacccatttaaatgtgcatttttaatctatccaagatctatttgtggcatgtgaggtcatgtgcagagttttattcatattttgagaattgatatattattggaagcagaagtctagagtctaataattgtttgttaaatgaatgaatgaatgaatgaatattctttgtaaaagactgaattcaaataaaccattgggtttaatgcagatttaactctcctacatttcactttgactcccacatcctccaagataccaccattgtgtctttgcagaatgagtgaatgaatgaatgaatgattattctttataaaggactgaagtcaaataaaccattgtgtttaatgcagattagagcacacatgaagccagacatggttttatttcactggatctcttttgacaagacaatccaatataaaatgccccttagaaatatatggaaagccatgtgacataagaacaaagtgggaaatgatggtcataatatgctgagaaagtctgaaatggaaaattcctttcaataagaaaccacataataaaaagttctcgttatatttgtagttacaagctatggtttattactctgtctagagattcttgtaatgattcattgttattggaagaaataaaatagggttcacaaaggagcttttatcagattataatgtgccctatcataaagtggggaaaaagaggcttatctggctatttgtagtccttgcccatgtggccatggatcagatactaattagaattctttttgaacccctggaatgctctgcagagtgaattccatgtcatgaccacacttgaagagtagtgcatgagaaggctgtttgataagtcctttaggtactaaaacaaatcaaaaccagtcctatttattctaacaaaagcctctctcctcatatgttctctgctttgcaccaaatgatttttggcttttcatctttctaaagtctagatatcctgatactttcatggaatttttgtgtaacttaccagtcatgtaagactgttaccatagagtaagtggtgagtttggcaaagagaatggattgagaatttggatcaagacagcccatagtcatattgctgaagagctacctttcctattggagtttacaagggttaaagaaacaccactatttctctaggatactaccttggtcaactttagtaaaacagatgatgtactagttgtgtattgtggctgaagatatcagtaggcttttatttttcttcttctttctctgtgcttttttctcctttgtttctataaattaaaatttctgggcatggcaacgagaactggctttgcacacacaatacccttggctccaaggaggtcatagatttggatcatctcccagattatacatctgcccctctagcttgcctttcagagcatatggctgtggcagagggggcagattacaaatcacctctgtgttgtttcaaaagtataagaaaggggaagcaccttttcctatgaccataaagttgttacttgagtgttaaaagacaacgattttcttgtgaattgtcttcagtgagttaagatgcattcagtgcattgcagtcatagaagtcacactaaacactatgtaggggaatacatgacatgaaaagtcctgacctctgtttttgggaacttacatgtcagctgaaatggctacagcaacacctgcaaagagggacaactcagagggtccatttattgctttacattttattctcaggtgctgacaaataatttttcttaaaaattatatttctggatatgaatacatattggagcaatcaattcatttcagagtatatcagccgtcagggcttcttttgaaattgcaggcattgaaaattctggatctaggcatagaatcctaccaaaagacaatacagagctagattgaaagcccaaggtactgccatgggggtaatttatgaatctggagaaataacagagtaagaagagatgaaggaaaagaggtggatattagagaagatatgttattcccttttctaagctcatctgtgttctgaatctgtacccaactatttatttcagagccttgttctattagttaatggttctttctcttctgtcttcagattttccctcttgattggctccttcctttaatccaaggagaattaatcaaggtgacaaaggtggtggggcaaaaacagtgggaatatatggaagcagcaaggaacataagaggaggtccaagcaaaagcagtggataacagtgcaaacaggaactatttactgaaagtccttactaaggagtttccctttatcatttaaatagcaaacagaatgaacattttaaagtaaaattctgtcatttcacttcttataaaccttcaatatggaacaattatatgaccacatgcaaaaagaaaagaaaaaataacctccgtctataccttacaccatataagaagctaatctgacatggttcacagatcttaaatgtgagcactaaaactataaaacttctagaaaacaaatgggagaaattttagttacagtgggttaagcagaactttttagagcactaaaaccaggaagtacaaaaaaatcaacaaattagatcttctgaaaattaaaaatgtttactcttcaaaagatactcttgagaaaatgaaaagacaagtcacagactaaaaatatttgaaaaacacatatccaacaaaggatctgtatacagaatatataaaagttccgaacccaaggaattgccaaaatttaaggataagcaaaggcacaagtagactatttactaggttattttagacaaagagtaatgagaagtggaagaagattgtcagagagaataggacacaaatgataaatgtattataaaatgtggcagagacaggtggataggacttgacacttttttatatttgtaaacaagagacaggaaggacccaaagctgacctgagactttgaggctagaagatcagaagaaaggtagtgcctttaatagaaagaatcatgaagaagggtcaagttatgagaatgaaagtatgagtctggagctccagagagatcaatcaaggttagcgatacagatttagaagtcatctgcattagaggtggtagttgaatattgaatttgtccacaagattgcacagattaaattaagtaataattctttgatgggggtaacagccattagttttttggttaactaaaagcctaagatgaaggcaaaggcagttactagagttaatgatcagtctcatttttgctattatcatgttcagtggtttgaaacaactagaatttttctctgaaaattagcagctgcatggaaatgcaaagtttctagcagttacaaattggatactaagttaaattgacttatatatttatatttacagaggatcttaaacagaaaaatgagatctttgttcaagtttttaaatattagtgagacatgagaacatagaagtcatacaatgaaatttgcactgattttgtgaacataatcttatgatttcttttaaaatgcaattatatgctttctttaaatcatattagttgtctgttttgatcaactgacaaaagtcagcttatccacatttttccatttagtaaaaataaattttgaataaatgatgatatggtcttcctaaagtgattagtaatacaaatatagggttttctctttttgttgttttcatcttcagagattagtagaaaatttttcttgttatttgaaaatacttttttttacacacatacatataaattacaggtttgcaaaaagtgacttcattttatctattgtaaactggtgattcctgtttatgtgatcataaatcttagtttgcctacttcttgcttgtgtttgttggcattaatgctgaagttttgacaaaaattactttaacttttgcttccctcggaacaaccagggaaaaatatcaacagcgaaaccggatagatgtggcaccaatagcttacttcaaataaattaatacttcattttttaggcaagaatggtaatcggttctgttctattagcctcagtggtgtgaacatagagtttcatcacattattgtgtgtaagatatatttacaagagacttagacaaagcaaggtcttccaagaataagcacaaaatgtctatacacacgagccttcagggaagattggggtgatacatggaatcgatgcactttcaagttggcggatctgatcatcagtctctaaatgttagtaatcatttggtttatttacttttgaaattaatgtgaagggctctgtagcttctttttcttccttgggttttgatgtgctgatgtaatttggacattgcttttctgcctacaaatgggacgattcctgatatgtgtagattagggtgaaatctcaggtgctttttgattttctactttcagagaaaaagtagaaattgctgctgatataccgagacttcaccgaagagatgttcagtgtaatataattattttgatgtcacttttcattgttttattcacaaaaaggaaaaacaatattttataggaaaacattagtaacaagagagatatcttaatttttaaattaatattcagtgctctttttaacacgatatttattaggtgcaagttacatgctattgtagtaaagttaaaagattattcaaatctttggaattttcagagatgaattttatcaaatacatatttttaaattaaatgggctatcaagtagagtttagaaatcttctgttcatacagatttttatcattttagtacttcatctgtgatataaaacataaatcttgagagaagggcttttgatttttgttaaaagcagcatgcacatcctataaggcatcagtcagaagactcattagaaacatcatactaaaaagttaaaatgtttcttacgctaagattatatcaccaaatccttgaaaagacatagcttcttatcagattgttctttgccttttagacttccgtttcaagggagaaaaagtaatttttgactaaatgtctattgatttaatgtctcccagacccaccaaatagagtttattcaacactaaaatgcagttacctctagaataaattttgaaagctgaaatggaatttggcaactgtttaactcgacacagaaaattcactgaatttagaacaagaagtaaagtgaacattattttatttaattcaagatgcagttgtattttaagaagacataataatgagatggcaaaccaaaataaataaatgaaaatgaattctgttttctaagctcctaactccatgcaaacattataggtcaaaaatacaattattgtagtcttaattggagtcatagcaacttgttgcttaatttataatttctctgtagtcacatatacagatatatagttttgagagagttaatacatggaaaatacttagcttagtgcctagaacactgaaagtactcagtcagtggttgcaattactgtggtgtttgttgctattttctgttgcattcttgtgtctcttttgacctttctcccttgcttcactctgaataatttcaagaaacatgattttggcttaactgcttaactagatttgaactactgattctattcttttagcaattaaaggattcttttcaatatttggtctctgattcaaccaggaaagaagagatgagaaatggtggtgttctttttgttgatttatctagaacctgtggttttcagactcaggttgagggaatataagtgattttcaataagatatgccagttttagggcttgttattgacttgcccctatagtcagggctgttaaaaggattttcaacaaaaacgatctcatcctcaatcttaatgtgctaaagaagaagacaataaaagaaaaaaaggcattcctctcaaacaatttgaaatatctgcagttattttttcagagtttttactaaaactcaagctagtctagctcattgtgaaattttacaaatgcatacttcggatttattttcaaaggggagaaatcattctaaacttccctgtttcttatttttcttttacagtccccatgctatttctccatttcagccaacactgttaacagactcttttaacatttatatgctcttgcaaattatggcataaaaaactatttcttgacttcttgctatgtactgatattgtataaggtactgtgaggatccacaaaattaaaaggcatagatttcagagagggtaaaacttacacatgggaaacaattaagatcaagtgatttataaacagtaacctctgaaatagaaggtgccaaattgtgtgacacagacaatagggcaacagggctcagagatgggcaagatcagcggggctgtattcatcaaggaaggatttggcttgagcttcagaaggattggttggatttgtatcactgtagaagagaggggaaggcattccaggcagcagggagagcaaaagcaagctcagaagcagaaatgtcatgcaaatgtcatggtatgccctaattttaatgattccgcagtcctatgaggtgactttaatctcactgtaatttatatcagcagcaaaggatttgagtttacaagctggcttcatttaaagaaaaggcagatagaggggtgaagatagaataaatacattcaacaaatagtaatagtcaataaaaatatgaaattttaaggttctagctattctaagcatgtccttcagtctgatgtttggttttaagaaggtaaaattcttagggcatcataaagaacctcaaacatttaagataactaatctaatctctaaaccagaggaaggatgtttttcttaatactgtaataaaagaggctgccaccatattttatatggcaccaactctattggttattaatcaagttcttaggctaaacttcaggccttctctcatcccaggacctttagctagtgagccctagtgaacatagccatcattcaactccttgccttctccaatgagaaagaatgctgacacagaaatgttttagagtcaactgcaagaactcattaataccaagcccaagaaggaactgctgatcatcagggatctgatcacaaaataaattagcagttttgcatcacgatgtcttgtgacatacatgcattagtgaaagtaaataagcatgaagacagactgattaagctcactcatataattggtttttgagaacggttccaatatattgggagaaaaataagcatcaacttggaaatcaaattgacttttttcttaacactgaacaaaagaattgttagaggtttgaggtaaaagatcgtggcagaagccagtattgattcacattactggtcagccctcttaagattctatgcttctctgggtgttaaaagtccactggaaaataagagaaagaaaattgagtttcaaggacgtagaaaaatctgatttgaaatcaggtggaaagtgctctaatgccactagtattaggaggcggtaatttgcagataaaaagtaaaaatacaggtctggaagtggtatatttaaaattttacttctgagatatatgatgagtccaaaataagttttaaaataaaatgaagtataattttgaggaatatagtgccaatttgacagaagagacttctcagctctttggggaaaatattgaaatgcatggttttaagtgatgctggctagaataaaggtggaaggaggaaaataaattacctcattttaacaacctcattaataaggtaataagagactgtcttaccagtgatgttatttgcggactaaagtttctcaaaaggaagaaaagagtatagtcttgaataaaaggtgtacccaagtatgaataaaataagtataaatcattcatttttcaaaaacctgtgaagctcaaagaataggtattattccattttgtagatgagaaaattgaggttttgaggcaaatagtagggaacagagtctagatttgaacctaggtcactttagacttgtttaaatatgtaaatcactcaaaactcagaatttttgcatttgacttcagataaacagactggataaattcctacctaaacagaaactaactttattgtaattttctaattcctcaatgttaagttctcaatgattaaaggtgccttgagtattttattcaaaactttttggtacttaatcctataaaaataatgacatactcttataattaaatagacttatttcaaactgtttcccaatttcaatttattcatcctttttactagtgacatcattcattcatgataaaggaaacaaggaggctttttcaggtaatgtcttaggagtaaggagagagaaagcaaagttagtaccttgttaagatttccaagaacttttatattcaggaatttatattcaggaatttcactgatttttttttaaagttccttcaggggcaattgggctgctgggctgctgattctcaataaccacacttacacctgacaaacaaaaatgcattactctgtgacaaggcataattagtaatttcccactgaactggaatagtcattttagctgtcagaaatatttcttttcctagtaagaaaattcacttgcaaaaacaaaaattaagatctgaagagtacttaccaagttgagcaagcaaggggaaatggataagctaaaaggcagctatgtgcttctctcctactggcatgtatcatagactcagtattttctagagaattatctggatactctcatcaatatatcctaattcaccaatatcagtataacatgtaattttttccctagaatacagcaaataataactgaagattttaagggacaacttcagacaataatacctaaatacattaaaatgactaaaggagtgtaattggcttgtttgtaacacaaaggataaattcttcaggggatggagacccccattcgccatcatgtgattatttcacattgcatgcatgtatgaaaacatctcatgtaccccacaaatatgtatacctactatgtactcaaagttaaaaattttaaaaaaattttaaaagtaaagaatatcctgtcagtaataataatatctaaatacaggactaaattaattcataatacaatttgtgttggttaggaatgctctaggctgcagataacagaaagccctactattggtggctgggcatggtggctcacacctgtaatcccagcactttgggaggccgaggcaggcggatcacaaggtcaggagatagagaccaacctgaccaacatggtgaaaccctgtctctactaaaaatacaaaaattagccaagtatcatgtcacgtgtctgtaatcccagctactcaggaggctgaggcaggaatatcgcttgaacccgggaggcggaggttgcagtgagccaagatcatgccaccacactccagcctgtgtgacagagtgagactccatctcaaaaaaaaaacaaaaagaaagaaagaaagaaagaacaccctactattggtgacataaagaagtaaagttcctgtttctcacctagtaagtagtatagaaatgggcggctgctagcagggaagaggagggagatttcagtggatatcagattggttgtatctctgattctctgggattcttccacttgaccatcttgcagtagatctaggcaaaacaggaagggataaagggagggaaaagagcgtgccagccttatttatcttaccagtaaaagctaaggtcttcccccagacggctttaacacatttccacacatagctcattgtccagaattggctcattgccaatcctggcctcaaaggctaggaagtaagaacataccggattttctcgcctctcctccagaggcaaaaaaggaaaaaggtgtctggaaatgggggtgggatgaccaaccaacagagactgccatgccacaaaaaataatacattctgccactaaaaggaactttaccatttattacattactctgttaccatgagcttacctgaagtgtaccttaaataatcacttgaggagaatttctatatatccaaaaacaagcagagaagaaaaaaatcatactcttaaggatttcagaagctaggctttgttccaggtgtgctttctgcaaagtgttttaaattcaagccttagcaaaatatcagattgctaccaggcaaggaccttcagagtcacttgataatataggaaaccacagtgtcatgcatttgctacagtggatgatggtgggacacccccataatccccttatttgaaggattttattcactgataaaagtcactgctatgtgatcatgattgattgctcaacttttaattattgacatatattacaagtaaatatgccatacatatacacacacacagacaaatatacacaaacacactagaatttctgatctacatgagataactattactctaaattgacataatttcagcccaaagcagaaatatttgctcttttggaaagtatgtgagcttagtaagatgtagttgtgaatcttcattttgatacttagcaataacttttcagatcttcattattattgcctagtatttccttcaggggcccccaaatgtggattgggaatccaggttggaaaccactatcctcaactttccactgatgctcccatattgcttttaaaagaaaacatatcagacttaaaagttatttaaatcttaaattagctacatcttaacagcataattagccttttataccaagattagtgaaagatgctcggctgggtgcggtggctcctgcctataatcccggtactttgggaggccgaggcgggtggatcacttgaggtcaggaatttgagaccagcctggccaacatggggaaaccccgtctctactaaaaatacaaaaattagccaggcatggtagtgcacacctgtagtcccagcaactcaggaggctgaggcaggagaatcgtttgaacccgggaggcagagtttccagtgagctgagatcacaccactgcactccagcctgggcaacagagtgagactctgtctcaaaaaaaaaaaaaaagaagatgctttatttttgtcttgttttctgaatgggtgataacaagattgataccaataaaattttgcttaatttgatttttcaaggtaaatatggcaatatatattttaccactttgttatttattttcttagttctatttcagatcacctgtcccctcgtttctataattattttccccacaattatatttgtatctgatagaccgtatttgccataaataagaagcactaatagctggtgttaaaataggtaaactttagtatattttatataaggaccattgaatacttatgattacttgttttaacaattaggatgtgtttgactgcaaataacagataattgataacagtggcttaactaaaaaaagggtttcttcttgtctggcatcaaggacagaggaggcaggcaggctagggttggtacagttgttcaaataagtcatcaaataccagacttctggcctcctgcgtctccatccataccgtgtagcttccaacctcatgtttgtgggatggctgctgcccctccatgtgccaggcaggaagaaggaggacaggtgaaggacaaaagacataattctgtcccttttatttggaaaataatagctgtccaaaaacttaacctcagatgcttcatccgtgtcttattattcaaaaccattacatgaaaacaaaaaaccgcatgaatatctggagagatgaatatttttaactagtcaggttgctactccaaagtcaggattttgttaaaaagaagctgaaaaactatttggcataaacaataagtagttatacatgagacagataagttagccaaatcaaaatcatcctctttatatcagtttttcccctaaatttaacttaaaatacctgaagtaattggaaataaagtagttttccaatgtagacattgaaaattatctgtaaactagttcagtgttctctgaacagcaactaacacatacattgcagaaatttcatgaatattagattgtgttgattgcttcaatgtttgttcttaatctaaattttcactttaacagttgcagctaactattcatatatacaatcaactctcagttaccaaagggtgaatgccctgaattcccactattgttggaaaacctggctatccatttcttctttgcattgtcacccagtggaaagagttcgctcctttgttatacttactgtgaattccactccttcacctaacaaaacaatgccagagcagaagcacgtgtgagttttttctttatagtcagatcagctgctgtggagggcctttccctctaatgaccagctcttccttcagcaaaagtataaagcatgcaggcagctatctaaaggagcaactactttggagccagacttctcaatcttgaccatgaatccaggtgagaaatactgagtaaaaatacaaaatggatttgcgtaagagttcactaactcctcctagatcaggtcttcactttcttctttgagatgtcatgagtttacagtatggaagacactctatttgtttatttcatcagtcatgtgttcacttggccaacacctgttaaatgcctaccttgtgctgtgtatcatgctgactcacaatgtatacagtcgcaccgtattctgcggccaaatggattaatatttgtaaacatagttagaagttttacttttgtaagttatctatgatcttgaacttttgttacaagtccaccaggttgtacagctctgtggtgggggtgagggtcatttataaaggctgcatgtgaatcatatcagcagtcccccaggggttgcagagcacacaccaccatgagtgtgtgtaattactctggttacttcattgcacatttgaggattggctcctgttttgtgttatccatattattagctcagctcatctagatctggacaaatatagtttttttaaaaaaagtctattttattttccctcatatgtatatatatctttatcttagataaattactattgcctataattttcatatatattataacctctgaagagaatttagtacctatattctttctactctttatttctttgtgtgaataggcaacatgtttacctcccttcactatagcatattggtattaggatatactatatacttgaaacttagaaaatttgcaagaataatcagctgatttcattcctgatgtataaaggaaaatattccattccttaagtgcttttagtaacttatattgcagtgactttaatattactgaggaagaaacctgtagtaatcttattcacctcattggtaagttcttgcaatatttattattaaacattaattattaaatatgaatagtattaaatgtgtggtacattgctttttttaataacccctttcctgatatcccttaatttacatggtatacttttacattgatttttttataaatcatttctacttactttctatctgaatattatctatctgaatattaatatcaattatctacctgaatatttctatctgaatattaattcttcagttagcaccaaatgcagaatttattatgcaacttttaagccctctacagaaatcattatattattttataaagaatccataacattttctcttcttggcttttcagcaagttgtctatagtatgtatatcataatattaccttgtgttttaaaccactcagaaaactggtaaaaagcagaattgtcattttactaaatattctttcttcagccaattcccatgtttatcatttccttaatttttattgtcctgtgttgtaaagtggtctgtggcttcaaagggcttttatttgctttacttgcttctaggtttctaactgcttgtgtgccttttgaatacatgtttaaacataagagaaaaaatgtgagtaaggctcgcttctgatttcagactgcttgagagggaagtgactgaaggggtaatatataatcacaaatcaaacccaaggccactgttaggcttctttcggtgccctgttgaacgggaaaaattaaaaaaaaaaaaagtctctcgagtttcacagattagcaaaaacttccttgtatttaccatgcactgaaaatacaattaacagtttgtatgagaagacgaaagataatgaaaagagaaattagtctctgaaaagcacattcttatgaggtcatgaattacaagttcatgtgtcttatggcaaaatatttatctaagagattcggctataaaaatcaggagtcaccaccctctttagattacccaaaagagttgataatgacttcataatagcataaaaaatctggggtctttattgtttttaattctgatttctatattttatctattgaaaatcaagagctgtggataaaaagttcatttagggcagggtgtggtggctcacacctgtaatcccatttgagagatcaaggcaggtggatcagctgacgtcagaagttcgagaccagccttaccaacatggtgaaaccctgtctctactaacaatacaaaaaattagccgggcatggtggcaggcacctgtaatcccagctactcgggaggctgaggcaagagaatcgcttgaacctgggaggcggaggttgcagtgagccgagattgcaccattgcaccccagcctgagcaacaagagtgaaactttgtctcaaaaaaaaaaaaaaaaaaaaaaaaaggttcaattagatgtcctaatgagagaaaagaaatttagcagggatcttttcatatcaatatcaacagttgttcaaatgctaatacaggtttctcttaatggttatgagaatggtgtttgcattaatggaaagcagacacagtaatctcaggtgtgttcatattatcattatttagtctgagaaatctattaagagttagtcttaatacaagtaactgaagttgttgccttcattaaggatttctgttcctgaaatttgtaatgtacacagtgaattaaatatggcatacattagccgctgatacaggaagacatatttgaaagaaacaggggaagtagaaatgtggatgggaagagcatttagcagtctcatccctctgccattccttccttttgtagtgagccagcagggcgcctggtgctgacagccttggcaaacaacctagagagaaaatatgtcttctgaaaagatcacgaaatctcaaagacctccagttccttggtatttatacagcatttgtggtattttcctcctttcttttcttatttatccttaacagaagaaacaacaagtaaatctggtgaaaagcttcaccaagaaaatgctttctgaaagaatttaaaagaagacaaaggagttgcagggagaagcaggttggcaatgaggagctaggcggggccttcgggagcgggagcagcacccaccatctcacaaatggcccttctcggcaacgttgggggatatttattccggggaagtcagagaagctccaaagtggcttgcagcgctttatcagccgacatttacacagaaactcctgcctctgagcttcctgtgaaatctataggaggagaagcccaagggactctggctgttagaaaatttgtcatcctgctagagagacctatagattggtggttaaccacatggatattgctgtcagacctgggtttgagtcctggccccatagctggctctctgtgtgacccttagtcatgctgagcctcagcttatttagctttaaatgatgggtaataataatatccacctcacaggtggaagtggggtgagagaatttgtgtggaacacctagctccatttctggcacctaggacaacctccatacctgctagttgttatgtttgagtgatctgcatatttgtaacaacagggatacaattaaacaagagtccatgctcttcaggaattaaggagaggcaaccttctaggttacagtcaggaaggttccatttgccagacaacgaataatccttgagtattcactctgctggccgttgatagaaaagtgaccgtgacttcatcactgccttcaaaaagcttagcaaggaagacaggtatatacacaaacaatgtacagaatggggagtgtgcttgggttcaaatcccagttttgttgttcattagctgtgtgaccttgaacaagatatttaacctctctgttcccaggttttcctctatataaatgacagtaataatagcactcacatccaagagttgtggtgaggattaaacttgtgaatactgtacagtatagcacttagaataatgcttggtactcaataaatatatattagtcattattataatacattgtggtaatagaaatgagagatctggcagattttctctcctaatttcttttttgacatagaagtggttaggaaaggcttcctggtagaagtgatgtctaaaaaatggccagtaaggagaggagagaacagaatcttagaaagagagacggcagatgcagagacccaatggaggagggagggaactgatgtctttgaagtatggcaatttgttcaaaatggctggagtttggactgtggggggaagaacaaaggaaggagaagagaggtgaagtaagatgagtgagagaggccaggtcaagaaggcctttgtaaatcatcccgaggagtttggaccttctgaaagccaaagggagccctacaggagtaatttgaccagacaatcaaaaatcctggaaacagatgcccagagggagaaagtgtataaataaagacagtattgagctgagagttaagccttggagaaagcccacatttgggggaaggagaaagaaagggcactggtaccagagaccaagaaggaataaatatattgtgagaagaaccaggtagcaccatgcttggacgcggagggaggataggatttcaagtaggaagggttaagcaaaggtagcgagtgctgagaagagatcaaacaaaataaggactgaaagaagtttattggttctggcaattaggaggcaattggtgaccttggagctttagggaagccttggagctagaaaccatatggcagggggtacagagagcaaggagaaagtcgacttcctggatgacacctctgggttctccaacttggcaataaaagaaagaaaaggatagaagtgagagtacttgcagggtttttaggagagactcaagggatgatttcagtgaatagattttcaagatttcggggactagagagaactggacgactgataggcttgggggggagaggggtccctcatacataaggctaagaagacaggttagatgcagagaccattttgaggttgaggaaggagaaaattagggaatttttttcaaaggtctgataaagagaaatacagaaatgggaggcttctgttttggaaggttttgagttagctgatgtgggagaagctttagggacttagaaataaataaaacaattgctgagcactcgagagacttgtgtgcctcttccacgacaaattaatgaatttaatttttctacaagtcttccataatagaatgaaaaattgtgcctacttaactccttatgaaacttcaatttaattctaattcagaactttaagaagccactaaactttataataactgttgttcataggctgagcgctgtggctcacacgtgtaatcccagcactttgggaggccaaggcagctggatcacttgagatcaggagttcgagaccaggttgaccaacatggctaaaccctgtctctacaaaaaaatataaaaattagctgagtgtgatggcgggcgtctgtaatcccagctactcgggaggctgaggcgaaagaattgcttgaacccaggaggcggagcttgcagtgagccaagatcgtaccacttcaccccagcctggatgacagagcaagaatctgtctcaaaaaaaaaaaaaaaaaaaaaaaaaacagttgttcattgcccaatctctttaattattatactaaattttccccccaaatttaaccttaccttttaaaagaattgccgaaataagtggtcatgttgccaacacatcctctccttctacttccaatattagtagcatttcagaattctttacttcttgaaatgtttcctctggatttcccaaaacattgggacactatagcctctatcacctacacatgctggaactatacctcacacgtgtttgtgctgttctcactgcctctgaggctaactaacgccattggaggactcgtcctattcatggatttcatccatgattcattttcctcattatatttttacctattttcagctttttgccttgttaattatgtacatttgccataatttcacaatggcattattaaaacatcagattgtccaaaggggaagctaaatggatgtcataccatttagaacagagtttctccttcaatcactgcttttatttatgaagtttagaccttagaatcgcctctgtgcaatgtgagagtcctcccctaaaactctgcaaagcttcttctgagtcacgtcatggcatgcaggagtctccaagcgggaaaggttgcttttgatggttcagccagttccatttcagtgaagggacatcacttccctaaaatgaaccccctcttggtaaacgttctccattttctagcagagtcaaaccaaaccagagagaggcacgttctgggaagtaagttctccagtgtttctaaccataaagctgggtttctgaaatccaagattactcccagcagggagcctaaatacagcctgaagctacaaaaaataagtatccctattttacctgtgatgtctataaattgtgaccacttattttcattccagagtcatactttgtgctgaaccatgaaaagcaaagctacatttaaaattttaaaccataagctattagagaagggtaaaagagtctctttgtgttaggatttcttctgtctaaaggtaggaatagcagttgccattctctgacataaatagctctcatataatacctttcagggaaaaaaattgctttaggacaaaataacagtcactactcctttttcccgtgcatgaactttggaacagaaaaataacattaacaggttattaaactgtttgtcaccaaagaaaagtagatggtatttttgtgccttggataatgttaagtgaagaaaaaaatcatcaaagggatcatctgtacttgccctgctttcaaaattactttttctcttttcaatggaattcacgactgttcttggttttcagacttgtgactttgttcattagagcaaatggtttaatttttattccaaactctagattaagtttcagagttcagcctgggagaaaggaactattgaaaaccttttctgtttccttctcttttttcttaagggagggctttggttctcagagaatatcaaattccgatgtcagttttgtaaataagtatctgttgtctccccagatcaagctgtgtttgtcttatttgtacatttatagtaaagtaatctacaagtggttccttgataaagttaacacttagttaattacccagagccttgacatgtcctataattgccacttggctaacaaacatttgatacttgtcttgggtagaatttgttgaggcctaaagaagtaagctcttgatggatggggaacaaaccaaataaatacagtattttatgttcttttaattcagggccaagtggatttggatgaagtgtttatttagtttgctggctgtttcaagatgctgtggcgtattgattccttttattactagcagccgtttaacctgacctcttccagatccagtattttaaaagccataaattttaactttacttatgagcaaaggctgaaacactgtgaaagcctttttattagtcgagctctgccattttcgatgctctggtgtcacccatggcaacaatatttagggcttcttacattagagtggctgctgggctgctggggaggggcataggcagccataaaatgaagccgtaaacatttcaagggtataagattccatgactgtgatagcagacaggtgcaagaaagaaggggcaggtctaaagacaaaagggttggggatgatcatgttaaataaacatctactttagcatctcaggtactgaaaagaatttgaaaattagaaacagaataccaggtaatcatagagcaaggtggagccagggaccaactcgagtgacccatcttgtaggtcccacactgcctaagtcattttctggtcttcatattgcacacaaaagttctctgaaaacgaagttgaaagaaagagaccttgttccagtgaacagttagcaaactagggagatgcagtatttctgtcccaaagtcccaggcacacccttaatctctgcaattgtaacaaaccaggaaatccactttttttcctaagttgggaaaatacatgcctcacatcatagactgatttgtacaaaatatagtaaaaactttccagaatgtcagtactttacttttctaagacactatataacctgcactcggaaggcaggcaactgttttgtatcaatcagcaaatcaaagccatttcatcttcaaatagcccagtgatgaaactcctgggcaggttgtctacattaaaagtacctgtttttccataaaaaagaggaagaaaaagaaattttatacatgagtttacccctgaaatggatgagtagatgagaatgccttgtagttgaagaggaagacaaaaagaaactaattctacttgtgtgtcttcctggttttaacttacacacatcagtagcttttgttcactttgttgaaaatttcccattcgttttctaattatcaaaaatgtttttttaaacaaataatttttttcaacactagccctctttttatttgatcatgtggaaaaactcttaatacagcattagggaggttatataagcaaagaatgatcatttcaccataggagaaaaatccaagatataaaaggatattgaaagaatttaaacaaaaacatcaacagaagagagatactgaatgaagagatgttcccccctttcttcactttatatttctttgcaaagaaatttaatccaaaataatatgtgattggacttggattattatttcatcttcctggtctctttcttttcattcttgataacagtgtacttgagcatccttatactacctattgccagaaactgccctagccttttaagaagccaggtactcattaattcaagtgatgtttacaagttggctcttaatatttgtctcctcttcaggtattccagtggcttaaattaatatatatatatatatttgtatgtgtgtatatatatatttatgtgtatatatatatatgtacacacacacatatatatttaaatttcttgctgttaaattgtttccccaatcatgtttcttagattgctgaaatagaagaaactttcttaagaatttgagaaagtataaatcagggctgtaacatcaggattttatcttctttcagttttataaaaatggcccaatctcaattagatataggtcccacactgcctaagtcattgtctggtcttcatattgcacagaaaagttctctgaaaaggaagttggaggaaagagaccttgttccagtgaaaaattagcaaactggggagatgcagtattccagagaacaaaaagaaggtttgggtgttatagtaaaagttcccacccaggttcccaatcaggtctgtttatgcaaatgagagattcaaacttgcttagttctgactgatcaatacagctgagccctggttggttgatacagcaaaatcctgattggctgaggcaggtgagctatgattgattagttcaggcaaattctgaaagttccagagttaaaaaggtgtggggttttggggaacccagagtaagaaagtgtataaactctattcagcaaatggctgctccgctctatcttaaatataggcccaattagccactcagaattcatcttgaaggattggttctttcagattcacatttgttcacaatataaaaactaaacccttcagagtgtgagaatccttacactattcctatggctagagacttctgtcctagcaattcaagaagccaaactttttttgtttgtttgtttttgagacagtctcactgtgtctcccaggctggagtgcagtggtgcaaacatggctcaactgcagcctcaatctcctgggctcaagggttcctcctgcctcagcctcctgagtagctgggaccacaggcgtgcataaccatgcctggctaatttgtttttattattttgtatagacagagtctcactttattgcccaggctcaaacattcttatgaattcaagtccctaaatgcaattcaattcactaaacagcagcataatgtttagtcttttctttttctgtgaccttatttgaatcaaaatggacctgaacactttcattacccaaactatggtctgatcagtattctatatcacactcctcctattgaataacagtatgtagaatttgaaaattgttaaaaatacttatagcaaaatatacaaaaacaaaatttaacctcttaatcatttttaagtgtacagttcagtagtgttgaatacattcacattgttgtgcagccagcttttactgtaccagacatgctaataaactcccctcttccctgaagtaagccagcggcctttccacccagagcagctggtgaatttgatgatcttgggcagaatgctcccctctacccccacaggagggaaagcagctcttaccttggggaagttactcagatttctagaaaaactttctgtaaggttggctgtcatggtgtgaattaaaaggttatgtcagaggttaaactatgcaattaaatcaagaaagcagattattctagtagctgacattaacgtttgaaaagagacaggattagctgtacttagtcacatataaactgcacaaagcgaacaaaggggaaaaaaattatttcaccaagcttcccttgaaagaaaatcgttccatcttgcacctctaatttttcagcttaattctgttacttcatgaggttcattatccttttccagatttgcacacggtgactgatgctctgtgacgggttgtttttgtttttctgctttaaaaaatattccctccctccctaaataattatctgcaaattaaccttttctcttactggaatatttgttagaatagaatatagaaaatagaaatgtgtaagcaagactgtttagacaggagataaattctttgaggccacaagggtatcatttattaaatgactgctgcagtcctctaaatgggccccttttgacctgaaagagttaatgctctattgaaagtggctgggttgtccccagccttactcccttggaaggctctgacccattaatggcggtaataataataatagaaaacaatcctgctttgcttccattactctgaaactgttaatggtatcctaatgttttttattcttttagtgtaactgaaaactgacattctgctcagctaaaatttcaaatgtagtatttttttttcattaccatttttacatgccatgcaggatgctgagtgaggaataaggcagaggcttgtaattggtcttttaaatcatcataaacatttatttttccccccatggctatatctagtgccaataactcagtcatcaaatgatgggaaaaactgtttaatgatgcatcacaagctccttcctaaatttttacccagaacaaggcagggaatataaaaataagtcacattgctcaaaagttgattttaaaataagcacaaaacagtttttttttttttttgtgggagtattagcagtgaaccaagtgttcctttctttttttgatataaaccctttttagaaaagccttgtgtttttatatttttattgtaagtaataatgaaaagtaaaataggactctgcaatgtgtggggcagaactgtggcttctgttttgggaggctgacgtttgtaaaaggcaggtaatgatattacccctctgtgggactgtcaagacaaggcaaagcatttggcacagagactgtaccatgggaagttctaaataaagattagctatcattattattattattgttgttgttgttgttctgccagagcaaaacatccatcccagtttagggtactgaggcaatacccactcagagcaattgaatcctagctagggcatggtatagatataagtccctgccttgcctattgtccatgtgcattagagtgactatgtttggatccagggtcactgacttcagaggccccttattgccagtgggtgtcataaacctgtttatctggccactaaggtccttgttggtcttttcccattctctctgttcaacctcattcctatactcccaggccccatgagcactctgcagtggacacatggctgggcttgctgccccttggcaggccgatgttctccgctgtcgcccactctgtctccaggaccatctctgtttggtgctgctcatattccaaggatctatttcagcctagagtcatcattttctcctctgacttctgccactccctctgtatcttgccacatcccaccttgtttgggatgcttttgagttttgcattttgaccttcatgtagattgcttgttccttgagagcaggtgttcacaaagagatacccatattgtcttttgatgagctgagtccacatcctgcagatgtggaggaaaagatcctcctttttaattagtagcaacatattacgtgtatatagagtacactgcagctttgtgaattttttgtacatacataatttcatcttataataacaaatgatgggaaaaactatttaatgatgcatcacaagctccttcctaaatttttacccagaacaaggcagggaatataaaaatatatcacattgctcaaaagttgattttaaaataagaacaaaacagtttttttttcttttttgggggagtattagcagtgaaccaagtgaaacttatgagactggcatccctgttaacttagacaagttactttatctttgcctcaattttctcaactataaaatgaggataatattagtgtatacctcatataattacatgagttaatagatatatataagaatgtgcctggtacagagatagctgctgctatttttatcatcatcattatcatcatcaatatgatttttccattatcccacttttactgatgtagaaactgaagcccagatgagattaaataacttccttagattctaaacctttcaattccaagtccccactgaacatgcctcctatatcaaatcttgttgttaagcaccctagactgcttttagtccatcatttccttagagtcaatttacagaaaagtttctaattcacagtttgtctggaaatttctgtgaaagggaaacttaaaacaaacacagtgataaaacacaaacccttctccagaaatagataccctcttcctgggagacaggtctctctcctcctaaatgagaggcctctgttgagtagtcatgagaatacctatgggaatacctagctcttaaaagtgatatcagatttcctccaatctctctaaaatccagacaacatatttaattaatgtcattgtagataggttgtttgaacccctggtcaaccatagcaagaattgattttacctctcttttgaaagccattctatttttctaaattgtctaaccattggtagtatgtttctacttattactaatgatctgaagaatggtcctctcttcacaaaggagtcaggggtcaaggtgagcaaaccaatgtaataaaactcttcttgatgtagaagatttgtcacttgtaaaatccatgcagcaacagactggaacatgcctgtctataagctggtgtcagacacacttctcactggtgtggttagctctgtactcaccattccttcaccagcagtctgccctgttactcaagtgtccgacctgagcagaaacaactggtggtaacatggattgttatgtggatgagagattggagaatagaatatgaagtcaagactgtgagttacaatggaaagaaaacaatttcaaactagttttgcaaagataatttcttgactcctggcaactaaaatgttcagaggaacatccacaaagaaatgtagctgcacccagggtctccatgtcagcagtactctctcgtgcagttctggttcctctcttcagacttgattcttacagaaaagcaagatggctgccagaagctccaggcttagattctcccagtaaccccagtaacaaagactgctcactctaccaggcttagttctagttagccctgtgtgtgtcagtagctgtcccagagctcaccagggggaagaaatgcactgattagtcatgtctgggtcgtaggcacactgaatgagagttgaggaggcatagtacaccaaggaaagccaggatgctcattttagatagaataatgggtgccggctaggaaaaagaatggatgtcagcactcgggggagaaaagagagacagtttaggataagtggagagttgtgacactcttgctgtttctctgtgcgcttctctgaggtagagtaaagcaagtgtttccatgtaccctgacatctcagtacaacccagcaagaatttcagtacaagaaagactgatcatagagttccctgagggaaggttattaatggaagtatcaccttcttgtaaccttgtttcccgctggcaaagattcctcaggctgagttactgggaaactccagtatgctgtcagatttcacaacaacattaagtggtacttcctttccatatttgccacctcatttattttgtgtgtccccatgttattagttttactgcccattaatcattatatattaccaaatatagtaaagcgtgcttacgaggagatagcaaagggtccggccatgacagtcacaatgaagccatgccaggaggaagcctaggggtagcaggcagtgccccctgtcccgtccacccagacacataaccctgagcacctcctggctcccaagtgcattaagatatgttcctgcaccctatccctcctcgtcagagaaaaacctggggaaaatagttctgttcattttgaggacagatgactaaccatgctaaaaatgtatatgaagaaattagaagaaatttgaaattgtaaaaagaaaggaagagcaagagattttattagcaatgagttccattgctgcaaaatataccactctctttccctttaatttattctatgtgtgtcttccatattattttttctctgaataccaatatcatcaagcgtttactctggtaaaaaaacttcatggctttctattgtcccctaatttgggccttgccttcttagccagatttcaaagcccttcatgcctttactttatcctttctactcatgtttatttcccaccaatctctaccacattgttttttgttactagtcactccatcctcccggtgtccccaccccccaggagacgtgtttggacttttcctcatgccttttcctctaagtggtgtgcctgtccacctcctacttctcttacctatatatcatccatcttcaaggatatgacccacatcatgcataaagtcttactcagtgacttaaagtcacactgtgctttcttttctctgacttctgcaagcctaaaatactccagcccttaactgtgctctatgtcagcattcttggtacgtggtttgcagagatacctgctggccagtgatcccaaaagtccatgaccttgtctgatttgtaattttgttgatggtgtcatgggttagtctgatggagaagagtgaaagaaactaactagttctttacttgctgtccctggcatggttattctcaggaaattgttttagcatgttacttcttcatgaaaaatatctttgcaagaaataaacaagtttatttgggctactaatagaagtaaaggagatagaagatgatttgaaaagtgataagaaatcttagaccaaaaaaagtagaagttttcaataaagagtgaaaattcagagctagtaatgaccctgtcctacaatgtatgaatagggaagcagaaatcctcttgccattctgtgggttatagagaatcctcctaatgggtgtaaattttgttcaccaaaaaaaaaatatgatgctaagcggtgacatgtactgaatatttgctgttgccaggtatcatgttcaaagttctgtatcagataatcttccaactaccccataaatgaggttctatcattatctctgttttacagataaggaaactgaggcactgagaggtaagagcctcacctagagtaacacaaatagtatatgggtggagctggggcataaaactgctatggttgagtgtgtccccaacaagttcatgtgctggaaacacagctcccagtgcagcagcgtggagataggtgggacctttgggagatgactgagtcatgaggcctctgccaccattaacccattcataaattagtggattaaaccattcatggattgatggattaatgggttattgagggagtgagttagtaatcatgagaatggtgtattataaaagctagtttggccatctgtcatgagccccctcaacgtgtgatgccctgtgctgccttgggactctgcagagagtccccaccagcaagaaggcccttaccagatgtggcccctaaaccttggcctccccagtctctagaactaaaagaaatcaatttcttttctttatacattacccattctcaggtattcagttatagcaacaaaaaacggactaagagaacccaagatgtctaatgtcagattgtgcttgtaatagcaattgctttaaagagtaaattatgagtgaatgccagagatgcaattaattagctgagtaaacaggtaacatggctaccattggaaatatgaatccagataaatccaggtgtatgtacgaacaatttattttctaaaatttggggacttgtattcccctgagatgggtccttcttgagctttaaggatctcctatacattctctggtgttattagttcatgtgtgtttatctttgctctacacatagactagaatgtctttgactaagctaggtgtttaatcttttatttctgaggcagcaaagaaaatgggaggaatttcagctcaaggtttgtcagaccaggaaagcctcatatagcatctgagtagccttgccaagtcaataggatgacatttccttgtatgcactctcagggaacttaaaataagaattgaaagaaggttgagtgtttgttctgaaatttacatgagatgtaggactgaggcactgcctctcaggaatgtgaagggaaatcacaaaatacctttggaaatcccctcaattcaccatagagaatacaaaattattgtttcaaagagatagccatttcatcagtcaaacaccgatgaaatagttggcttgtgtttgaagatagtgacacattgctatagacaaaatgtttgtttcccccaaaaaatcatacattgaaatcctataccacaatatgatggtattagtagatagggcctttgagaaattattaggtcgtgatgctggaaccctcttgaataggtttagtgctcttctaaaagaggccccagaaagctcttccacttgagaatgtggcaagaagatggccatctgtgaaccaggaagtaggtcctcaacagacactgaatctgcctgtgccttgatcttgcacttcccagcctccagaacagtggagaaatacatttctgttgtttgtaagccagtttatgaaatttcattatagctgcccaaatggactaagacaaaaattggtaccaagaagtaaaatgacactataacaaatacctaaaaatatggaaacagctttgaaactgggtaatgggtggaggctgaaagagtttttaagtgcatgcttaaaaaagcccacattgtcatgactgaacttttaaaaggtgattctggcaagggctccaaagcaaaacaaaaacaaacaaaaaaagcaacagcaacgacaaaaaacaccaacaccaccaacaccaccatcacaagaggagagctgtaaagaaagcttcgatctctgagtcttcttagatgatacccacataatcttgaatagaacgttggtagaaatatggatggtaaaggccattcttatgaggtctcagatggaaatgaggaacatgttattcacggaaactggagaaaagaccatcctcgatataaagtagcaaagaactttgctgaagtgtgttgttctggtgtattatggaaggtagaacttgtaagtgatgaaattgggtatttagctgaagctatttgtaagcaaatttctctgatttctctaaaatccagatagcgtatttaattaatgtaattgtagatagtttgtttgaacccataggcacagcctggctttttctgactgcttatagtaaaattcaagatgagaaaaatgacctaaagatggaattgtccatcaaaaaggaagcagagcttaaagacttaggtaattctcagcctatccatattgaaaagtctgaaaaagcctgtttgggaaagaatactaaggatgtggtcaaacaactgtttgataaggagattagtatggatcagccatctcagcagaagccaggagctattctccaggacaatggaagaatgactctgaaggcaattcagtgatcatcaggacaatccttcctaccaacaggcccagagtgcaagggccctggagacagagtggtgtcaaaggaggggctgctggtgccctcaggacctcagtgcatgctgcatagggcagccaaacaccactgggttctattccttgtgctgtagtgtcaaattgcttggacaccccaggtagagctccagtgggacccagtgtagcatgggtcacagaggctatccctcccaagggcacaggcagcaactttggtggcatccacacaatgccatctctgctggtgcagagagctgtagtagagccctcatgaatgggattagtttccttataaaaaaaagactcacagagagttcccttgacccttccaccatgtgaggacacaatgagaacacaggcatccatggaccaggaagcaggccctcaccagacaccaaatctgtcagcaccttgatcttgaacttcccagcctccagaactgcgagaaaattccattgttgataagccacccagtctatggtatttttgttatagcagaccacattaactcaggcacacatgaaagctataaatcttgaaacacaggaatcatactcagggtggtgagatgctcagcatgagagaggcaagcaaagacccgcagagaacaactcatttctccaaactcctgttccctcccagacacacagtccctcaagggcacactgtcattgagatggaaggtaagtgaaattgctctcattaagttattttatcctgcccatcctcccacctttttttctagttttctctcatcatgaacatacagttgaatttgggtaagatcaattgtgtgtgattagacttcactttgtacaggaaaaaaatttagtgaactgtaaagccacagaaaatgttagttatagtcacatttatcttccattcctcttaggaccaagcacagttatgagccacaaaaaatacccagtaaataattgtcaacagctgacttgattttggcttgacattttaacattagattgaaaccttgcttaaagtgtatttataaagaaattgttattcatatgaacatgaaactgaaaaacctcactttctatcagttctgtaaataactcagttattgagaattgaaatgctcttttttttcaagtacaatcggatagatataaaaaggggaaaaatacaaaaaattataaaaatagcatttaaccttaaaaaatacaggtgcccaggctatacaatatgtaaagatacattcatatatgtaccctccaagaaatcaatcaaacattgaccttttatgttatgctaatggtttttgaggaaacattaaaattctttatattatgccttattttgagagtactgtcatatacaacccacataaacatacaaaccactcaacaatcaaaagcagaagaaacatttactgttttagcaagacatacaaagagttaatggcaaaaggaaagagagggaaaaaatcaccgcaatggtctgtgtttagaatataaagcctgttaccaaggtatacaaggaggagctggaaggcaaataaaggtgttcttggcagtaggtaaaattaagactatttaaagcacacatgaggtggaaatggcagaaaacattaatattacaaagataagttaagcaaaaggaacaactagtatgcaaagaaaggcaaaatacagagatgaatgaataattatgggtagggcagtaattattaaatcattgaaagtatgtaaaagaacctaagggttgtattaacaaagaagaggaagctgtatgtgggctttgaggaagtgaagcaattgtggactgtttctccatgtaaaactttgttcagtctcacagcactgaagaaaaggggcatcccagtgttgtaagtaccctttaccttcatgttccttttttcctacaacaaatatttgtgcagtagatctctgtactgaggatagaaaaatcaataagtctaggaaaggtaggtaacattttttgatgctgtatcacaggtaggaaaatttcccacactggtccatttatttgaccctcaaatgagtattctattacttatttaaataataaaggtagtgttttcctataagtacccacatgtctcttctggagaccaatgctgtgtacttaatttttcagttattttcttgaatgcagctttttatttgttttttgtttgttcattttgtttttttaatccagtagagtctttctaagggaggaaagaatgaaaacaaaagattaaaacaaaccagcatgctgggaatggtgttgtctgggatcctcagttgccctaccagaatctacccacagataaggttatatatgtatctttagaaatagtttaaccactaagttgaaccatggagtatattttcttatctgtaagatagaagaaaaaagaaaaacaaaaatgtcagaatatttttggggtaatgaattcactatttgttacattttggggacataatctgagttcaggaaagaaacctaaacaagacataaaattttgactatttgtttgtgaaagaaggaatttttagtaaagaaaattaaagtatatagcaatacttggcaaacatttgaacacacttgaagggccatgctcatactcataatcaaggaatttatttgttcacataatcttccgatattttctctggatagtttcactttaaaataaagtatttggagatagggtaggagagattatgcaaatgtatgaatcttaatgagaagttcattattgaacattttgatgtgaatttcaggaaacgataaaagaccctgggatttgtgagacttaaaagaaaaattccactcttggagaacttggaaattgccagtaaaagaactgagacccaaatgacagcagataatgtaaagccaaattgcattatgccctatggtaatgaataggaaacagggcactgtgataagcttggaatgatgatcaatatttggaacactgtgataggcaagaaggtaattaggcccattatgaacacagtgaacacagataacataacttgggaaattatacatttggatattatggagaattttttaaaggctaatggatttgcaatgatatcaagtaaagcatataagacattttgcctctaggaaatctacttaaaaaatcaaacagaaaattttcagtaaatgtaatctaaaatgaaaagacaaagtgaaatatgtgggagaataaagtggtattgtgactcctacttggaatttacaataattttgtattcaaagagttttacatttattaatttcacatcacaactccccatgcagcaggaaaggcgtttctattgtgtttgtccaagttgactgctcataataaggcaaggccaaattgataataaaagcaagctatcttgacaagttctcagccttcccaggtctcatgctgtgacccctggatggcattataataatcttgatccctaatttatgatgggaaacaatccctttattttagaaggaaggattgtaaattaattaattttcactaagtgccgtgagggccattgatgttattggaatgtacaaattaatacattatttattgttaatttatcataagtatttgttaattacaaagctctagctggaagaaaaacttgccatgtatctggaagtgaatatcttccctaagacaatttctcattttttaatatggatgtattggaagcaatttcatcaataatggaagatccaattactggtcttctggattaagacattcttttattgtgagatttttaatgctaaagtgggaagttcaaacattgccaattaaatctcagactaattaggtgattatagcctaaggagaagggcaactaagactccactattaatctatcttatcacaatggcctctatatgtgatgaacagatgaacatatatatacctgtgtcaaaagaagaaatgtaaggcattgtttgaaaaaacaatttcaggagtttaattgttttaaaaaaatttaaggagttgtttccctttttgaataaaaagggaaagcattttttatgaagtcctttttagctgtttgtagaacgcatgatcatatttaagaattcaatgatggattgaaccaaatctaagatttccctcattgaaatgtttagaggtggtacaaaagtgactgtgacagtaatgatcaccattgctttatgagcactcacgatgtgccaggcacccttctatgcttttcttatcctcaatatgatagctgagggaactgaggcacaaagaggttattaactcaagaagtaattagcagggcagggaatgtttggatattctacagcctccttttaatccttcagtattaaccactaccctctagacagttttattctcaattattcaaatcatctgcctgtggagaagcaacagcagtgctcagctgtaaggcaagggcaggaatccaagactgagtcagagaaactgaggtccacatccaaactatcctccaggaaggaccttctgtttcatagcatgttgaagtgaggctttctataatacctggaaggctggggcagcggtttctcagcatcttaagaatcagtttcatagtggcacctctccaactaggtggtagctctctcatgggcctcttgccaccctttttatgcctacaggacacatgggcattttgcctggcacagcttaactctttagtcttggagtgtgtttgtgtatgtgtgtgtgtgtgtgtgtgtgtgtgtgtgtgtgttcattcttttcataacgctgtatttttgggaatggagggtagtaggggatgtatcggaggattgatctgtgcagaagacatgaccctgaaatttccctctactctatataggaccatgtcaagctaatccttcatttggaaacagatggaatctttaaaagcgctataacatctttttaaaaaaaaaaaaatatgtggcatttttttaatgaggccacaattttaagagaaaatttggcacctgacattaagaatgtttttattataccaccttgagaataatttttatgtgagatccttcttttagcacccttgataattgtgtgtcatctgtttcatgaatcttgtgtatgttgagctcatgtttgtgaggggaggatccgttcttctcgatcttaaagaacatggacatagaagccacaaccaatatcgcatcagctatagatgaaaatatgaagagtcatcatattttaggataacttcaatgggatcaattggctgaggttttgattttgctaaattactcacttgaaagagacctcttcttgagacccctggttttagtgaaagcctagaaaaaaaaaatgtgatttttgtaaatggtgaggctagacatagacagtgaatcttctcattttaaaagctgtaaaattttctacgcaccatcaacctaaactgaaattggtgagagtaggagtagggaagagggattgaaagtggcaatttattgtactccacacaatctttacagggagggtattttattccaagtgttttgttggaatttaacactgatgcctttcaattgacattataatcccttacacagcaggtaaccttgaccttctgtaggagccctcaaacatatgaaagacatggggatccctggagaaggtgcttgtcagagcccccagttcagtcagttcactgtacctgtaaatccttataaggactttcctgattttggttctcttctctaacatgagtccctactctacagctacattctgtgcattctccaggaataaatagaattttttttccaatcctgaaaactccagagtccacatttacaacctaaggactcaaccaccctttttgcttttaatattaccatgtattacatccaatagagttaggttgtaatattgcccaacatcagttagtacttctactttgtgacttctatttatatagagtgaattaattgccaactctattaatcttgcaaaatccatgaatccttaatgttcagtttgcttagaatgaggaacagtgtatttgtttcttcttagctatgacttcttgctgagcttcacatgagctccttttagataacgtgccttctatcttggacgatttattcactttcatgttccctggaatttattgctaaacgttgacgtgaatgcttacagtttgggctctaatgtaatctcctgaatggcaattaataaataaaagatggttactattgctgacagagaatcagggctttctcagatagttttcatcttcatgttttcactaaacttcatgtcagacatccctaggggctgatattataaaatattttctgtaaactccaaagcttttactattgcttctatacacccaaacctctgtgatgccttttgttttcttgtcagaaatcatcttattcaatttctgtttcttcaacttatcttccttcctgggaatataaaaaatatgcctctttctggatttaatagtgacatatcctcagtatttatgacttgcaagtaacacctgaaatttgtccctgaaattttttgtatttttttttttgcttagtcttatctctgttgcatttattgaatatactctgttgaatttactgaatactgaattgcacttaccctacattaatagccagtagggtttataaaatctagtgtttattgtcatcctgtatattgttcaaagtgcaaagttgtctcctataagttaatgatgaaactataacgcaacatccaatttttgcagtttgcctacttgacgaggctccagggttaatctagcctaatattcttattttagaaatgaggacaatgtagggcagtttaagttgtttgaccataatcaaatagagggtgcagagcaaatacatctttagacagtaaagtacatggtacacagcagaaaagctggaactaggctgcctcggcccagctcctggtctggatgcttattaagtgtttaactttagacaagttatgtcaatgctgtgtgcctcaatttctgaatctgtaaaatggggctaaaagtagtaccagtagcacaactataaggattatagtaagttactgtgggtgaggcatttagaatagtgcttaacacagactaagcactccatgcattattagctattacgattattcattatgttgactatttttaacacgttcggatcataggtaaaggtgtgtattgctatttcacttcacataggtatatatatacatcagtgcttttttgtacttcttttgtattccttaatgctgtgtgcagctgctagtagtagtgttcatagtggcagtgataatagaagcaaaaatagtgatgatagtaataaaagatagtgccgtttattgagccttgctaggtgctagacattgaagtaggtactttacatacataattcttaataggtactcttgtctattgataaatgacacagtcgttttttcccagaaatgcaagtagacttcatgacagtagtctccttcgtaactggaaaggaacatgagctgtggccctggtggaaaagctttgactgtagagacaagagccctgatagaattccttctgtcttaaagataatcctgctaatattatatattatatatatatatataatatatatatataatgctgctaatatttatataacctaatcctgttattgataattgagagactagctgggggtgggaatggaggtcaaggaatggagtgggagggggcaggtagagggcaaggcaaaccgcacaaatgaaaaacattatataccagaaaagcaatgattcaaattcagttgtgctctatattttctgttttataattttatattgcattaaaaggttgcctcttttctagataccaaataggaatacattcagaactatagcatcgacacagaaaagttgttttctttcttgctttgcttgcttgattgattgattaaataaatggcagttaccatacattaatagccaatagggtaaggtaaagtgtttaattagaaaaatcacagtcacttcaatgttcttttatttccatgcccagtatgttccttactaatcatatgagcaaccatggcaatgataaaagctgtcaggtgtgggagtgctaggacgatactggaagagaagctctcgtcatgttaggtgcttggtatgtttgtgtgtgtgtctgtgagtatgcatgtgtgtatgtgggtattctcacatatgtgaaatcactctcattcacatacatagtctctataaatagctacagcctttcaaattcataggtgtgtgtgtatatgcctatagacacacatgcatatacacttctgcatagagagaaatgtacctatagtcatattaaattttatcacagctttagaaaaggaaacagaggctcagagaagtcaaaccacttgttcaaggttacaaaaggtggcaaagctggagtataaccccaactcccacccacttaacaccccttttttgggatgtccagacagaaatattcttagaacaatagcattacaccacactgccccattagaagaggggtgaccttttgccctttcttttccagaatctccaagcaaagattttggtccaactctgggtttgaaaaagtccagctccttggagagtctgcagactgcagtggccgaggtcaggaagaatgaccttccctttcacaggccccggccgcacatggttcgaggccgaggctgcaatgagagctttagagcagccattgacaaatcctacgatggacctgaagaaatagaagctggtaggatgatatgcttccttaaatggcttcttcatctcattattatctgcaaatcatgggcaagaatgtgtgctcaactacagaaaaaaatgatttaaggatcacaattatatttttgatattaaaagtaattcattttcctgatatgttttgccctttggcttaatgaacatggaattggagaacacaatatgcaatttattttacagtgcaaggctaaataaatgttctccttcacttttctacaaggaccaactgtcatttacccttagggtaggagcactaagtatgcatttcttgacattctcattcgagtcattagaggcagcatcaatccaaggactccgactgcattaattgggtagaagcagttgggatattttgtactcaaaactctcttctcaccctgtttgtttcccagcatgcaggctttctgagctgatcaaggttaacaaggcagctttcagagagattagtgcttgaacacatatcaagcctttcatactaccagctaagcaaccggttgtccccactcccagcatcaagtcttgctcgaagtaaccagatttaggcagtcagatcttcaaagggcgcacgtaaccacatagaagggtagaactacagagtgctgttattcattcttttgcattttacatgttagcgtttctctgtatactaactgagtgtgcccctgaccatgggtattgattattttttctctgtacagacggtctgtctgataagagctctcactctggccaaggagctctgaattgtgagtctgcccctcaggggaattcggagctagaggacatggaaaataaagccaggaaagtcaaaaaaacgaaagagaaggagaagaaaaaggaaaagggcaaattgaaagtcaaggagaaaaagcgcaaagaggagaatgaagatccagaaaggaaaataaagaagaagggcttcggcgccatgctgaggtatgggcctgctttgaaggcaaagttggttctcattttgtctctcctggtaaaatcactcctttgtctgtactcagaaaaaagcgcacgcttttcctcgtcttcagccaaatgcatacggctctcaattctgtgctcgttctctttctgcagaggcagaggagctttttggggaaagttacagtgatgacaggacactgtcttaagtttgttgtcaaagaaaggtcaacactatgccaggcacggtggctcatgcctgtaatctcagtactttgggaggctgggaggattgcttgagcccaagagttcaagaccagcctgggcaaggtagggagaccctattctttttttcttttttcttttctttttttttttttttttttttttgagacagtcgcgctttgtcgcccaggctggagtgcagtggcgtgatctcggctcactgcaacctccgcctcctgggttcaagcgattcttctgccttagcctccctagtagctgagactataggcatgcaccacaacgcccagctcatttttgtatttttagtagagtggagtttcgccatgtgggccaggagtcttgaactcctgacctcaagtgatctgccttgtctgccttggcctcccaaagtgctggggtttcaggcaggagaccctatttctaagaaaaaaaaaattagccaggcacagtggtgcatacctgtaatcccaagtactcaggaggctgaggccagagcatggcttgatcccagtagttcaaggctgcagtgagctatgattacaccataaaagaaaggccaatacttagtagaggcatggacaatgcctgcagtcctttgtaccaaagtgttatgaaaataaatacttcctctgacaccacagggaaagtgggaagtggggaagccctatgtgttacctctggaatacctcttttgaagcaggggagtcagggtagatgaacctcatccctctgtgactctaggtgtgcagtggccgggcctctgggcacatcacttgtcacctccagaggcactgtggtacaggggagatgtcactgggtctgggctctgatgcccaagtctggatccatgactccccacacatgagcaatggggcttcacacacattgcttagcttccctgagccttactttccttacttttaaaatgaggccagcatacttgctctactgacccagcacagttgtgagatatgatttcatatgctatacattcattgactagacggggctcaacatggcacagtcagaaaacagctttgtttcttctctccccttcaagtataaactgttgaggctgcctcttccacaccctgacatctcagctttctggctgatagctttctggtcacttttgggtaaaaaaaaaagcaacttgtttgtcgggggctaaaatatgcaatccaatataaatgaaagctttcttcctttctgcctgttggacctgaaccacaaggagcatcctatggtatggtgggaggcaggattccaccttctcctatttctcagtctttggaaccaggagacaaagacaagattcaataggataggattttacttaactggcattatctggtataatctggccatcaaggaatctttgtggctacttttgtggattttttagagtgctccttactataccagtcactaatgtaggtgattttcccactgacctatttccctaagcctctgacctcagacatatacccctgagtctccttaccccggctggtagacttcttggacagtgccagtttgagacagctctagcttaacttacagccacagcatctacctggcttattagagttcctgatctcccaccctccaaatgatgcaagtacagcttgttcccactgtaccgctcctcctcaccccaccatagagatgttccaaccagccttgcatcttcagacttctccagcacatcccacaccagctctgggcctcctcactccagaagcacacatcagactctcccaagaatgctgtcatgcatggggaagggaggaggcagtcaatttttgcaagtcacaaaataaacaggtaggaagtggggtgacaatctcctattatacaattacctccaaattccctaaggggtttacttgtagccccctcacttattttgttgggtgttacaggcagaagtacccctttctattactgtctttactcctataatttcttctcaaatcaattgatcactatacttctgtgggctgaaggtgaatgatgggagatgatggtttaggggccagtttggccacctcttatgaaacccttaggagatacctcatttaagaatgctgcgtgtatttattaccaattgttctcattttgtgatcatcagctgaaatttctacatagaaaagaaagttccatcattccatatataagtgacatttagggaatacaaataatcctcttagcagtgagccttcccgttacatttccagtgctcatgaaatgctaagcaaggttcctcatgctcaaaatcttgggagcgatgttgcccctggatgtgttatgacaagacttgctgcggtcctgctatcacctggggtgaggttaccccagcaggcctgatgtcataatagctatctgaatattaaaaaacaaaattttggccaggcatagtggcccaagcctgtaatcccagcactttgggaggccaagacgggcggatcacctgaggtcaggagttcgagaccagcttgactaacatggagaaaccccttctctactaaaaatacaaaattagccgggcgtggtggtgcatgcctataatcccagctactcgggaggctgagacaggagaatcgcttgaacctgggaggcagaggttgtggtgagccaagattgcaccattgtactcccgcctgggcaacaagagcaaaactccatctcaaaaaaaaaaaaaaattcagctaggcatagtggctcaggcatgtaatcccagcactttgagaggctgagatgggcaaatcacttgagcccaggagttataagacaagcctgaacaacatggcaaaaacccatttccataaaaaaaggaaaaaaacacaaattagctgggcatggtggcatgtgcctatagtcccagctactcaggaggctgaagtgggaggattgacttagcctgggaggtagaggatacagtgagccatgatcccttcactggactccagcctgggcaacagagtaagaccctatctcaaaaaattaaaattaaaaagaacaaaatttcagcaaattgagttctaacaattgaattggattttattagtgattcataaattggtccacatcccatctacagaatagaagggcatttgagtgagatgagcagaaggtgtgagcttcataggcagaaaaagactgaagaaagcagaaacaaggaacaaaaaaaggattgctcatttccaaattgcattccttatagggttaaagtagagggactttatcattccagctcatgtcactggtcctcctttgattagttgctgggaatctcctatattttgggaaactgacccatttctaagttcagtttgattatgtggcatgtagcatgagtgactccattctggtttggtctggtctgttgtggcctagtgcaggagctcaaataatggcctcccatacattttattgaatatgatctatagtatagtaaatgccagattgggacagatgtcccaatagacattcgtcctgatggcctctgtagactctgtccttccagttgccattttgaattttaaacttgcccatattctagataattattaggattgccagaatttatgaactgtgagttaaccatcttgatgataatgacaacatgtaattgcaatatatttagataagaattttgtctttgaagggatggagttgagaggtgaaaattacaggctctgcctacagactttctgagttcaatcctggcttctctaattttcacttctgtaacactgagcaagttctttaacttctgttgtctcagtgtcttcatctgaaacatgagaagcataatagaattatcatttttatgagaatcatattttattagatgtaacatggttagacctgtgcctggcaagcaataaacattcaataaatgttaattattatagtaaacataataatgacccctgaaggtgtctgcatcccaacccccagtacttgtgtaaatattttgttacatgacaaaggaaaattaaggttgcgggtggaattaaggttgttgatcagctgacctgaacataaggtgattatcctgcattttccccaatatacccaatgtaatcacaaggagccttaaagtaaaagaagacaaggtgactgtggaaatgaggtacagagaaatgtagtgctgctggctttcaagatggagggaggggaccatgagccaaggaatgtaggcagcctctagaaactagaaagggcaaggaaatggattctctctggggagcactagaaaggaatgcagcctaacaactccttgaacaccttggttttagccctgttgtgttctttgaaccactgtttgttgtaatttcttacagcatcaaatcaaaaactaatatagttatcatcataattacttttactacttttatgatatcatagtaatgtataaggaagagttttttctttaaggtgttaacgaaaaacactattaaaatatttaactaaaatagtctgtaaatataaaaactgttagagcttcacatatcccattttctagaatattactaaattaaaccttaactttatattttatttcagatgatttgatttggcatgttcatacttcattgcccataatacagtgctggttcttcccttttattgtcccatatattctgtattttcatgtagtagaaatcacaggtcctggatcctttagacatttagcacctcgggctttgtttctttccacgattttagcaaagttaagatctgaaaggtggtgtttgattttatcttctgtgtaaaaatagcaactgttttccatagccttttgcatctgagtttgtgagcatattggagttactgctacatgcacattttcaacaacaaagaacacaaagctgttaccattagccaacagattttgctttaattctcatctgttgctcagatgctattgacttagtttctttcttatttaaaaaaagattgattgctttaaggttctcttggagttagatgtgtgttttaagtatgtattattttttccgttatctgcgtttctcagatgctctcctgaagatagggtattgggatgggtcatgcagttataccatgtagaatggcacctggccaagggggtgaatgaagatttaaatcctgcctccctttcctcaccaaggctggcatcatgaaaatgtgaatgccttagtggtgttcttgttcttgtttgtgaaaagctaagtgtttgcacttttctgatattagctggtccatttgtgtcaataatatgtagtagcacagtttaacttcttaatttaacctactcttgatccttttgaaaaaattacagaggatgtctttaattaatatctttatacatgttgtctaattccaatatgcttatactttgttgatttcagaattatctccttgcatgattcaagtgtgattcttatatagaccatgaattattattattattgtggaaaaatatgcagctcaagagcctaccaattttgtagtttctctgtatgctctgtgcttaaattttttcattatatgtttgagttccatacatattgtgctctttatggcactaacctgcagaaagactgttcatgcccctttcagccaaagggtgaagctccagctcctttaaaagacaagcccattgctgtcagtcctaggccaccttcctggggcctagcagatttttctaggagccaaagagaaatatcctttgacaaagaaaattttaccttgtctaaagtggaaaacccagagattagtttctgatttcttacttaataaccttgtcaatccttatgttacttaaactaaattctgtcatagatttatgttcaaatccattttttttatataatagctgctgttgtctctttttgatattataggccactcacttcaaaaacctttgaactgtcaacttattttggacactgaatggaaaggtttgatatggttcagattcccttatctacaacttttataaaatttgatcctaagaggaattatgccttgcaaactcctttttactagactaatgaagaaccaagtacaaacgctgccaataggaacttcatctttgcttttaaaatgtgtttgcccatatcatttgattagtaacatttattgaaagccttgtctttgccaagcacattcataattatttttatgctatatctattaatttattgtaatcaataattaaacttatcagttaatttattaaagccctattttgtatcaggcactgttctaggcacttgacacacagcaaccaagtcctgctttaacagcacttttcctgtcttaataaaggaaggaaggataaaaacttttgagttcattgtggtgagattaaaacaaaaacaagcagccaggcatggtggctctcgcctgtaatcccagcactttgggaggccgaggcaggcagatcacgaggtcaggagattgagaccatcctggctaacatggtgaaaccccgtctctactaaaaaatacaaaaaattagccatgcgtggtggcgggcgcctgtagtcccagctactcaggaggctgaggcaggagaatggcgtgaacctgggaggtggagcttgcagtgagccgagatagcaccactgcactctagcctgggtgagagcgagactccgtctcaaaaaaaaaaaaaaaccaaacaacaaaacaaaaccccaagacaagcaaaatattacataaacatgtaaactatttgtaacagtggattacccagggagtgaaggggatattcactagatatttcagggacaatccagtaccccatcagctcgagggaatcaatggtcaatttacatggtgtcaagcaagacatccaggccatggctctcacggaatttacattccagtgaagggaagagaataaacaactaatccaaaataattgatacgattccaaattgtagtaggtgctatgaaaaaggtaaagcagaaagaatggtgtcatcccacccttggtgacggtctaacagcagaatagagtgcacactgcacacagcccaagctacactgaattttcagcagatacgttatcagaatttagcacactatggtactaaagccaaatcactttatgcctgcttttgttttcttttttgcaacttataaatatgggaaggttatttttaaaccaactccacatagagctataacaaaaaactaacccaaactgtgtctgttttagtacacaaaaccctaggatacctgcagtacacattctaagacaggtgggcattaatgtaaatggtgaacttggtttacaggtgattggatcaactctgttcctcctacctcatcagctggatattctttattgtttcttctcaactcagataatgcaagcatacctcaaagatagactagttcggttacatagtggagcatcagacaaagctaaatcatgaacccttgaggcaaaggtatttttaacaatctagaggcatcaactttttgttcctaagccttacagattttaaggcatatatgtttacttcattttattctaaaatatactatctattttatttaaactaggggaattctatataaagacatcctgctgtgaattattttaaaaagaacactcctacacacacatcacacctaccactaccaccacaaacaacacaccaccaaattagccaaattaacactgaacctagttaaaaatctgtcccttagaagctctgtggccttcactaccaccaaattaatgctgaacctaattaaaaatctatcccttacaagctctgcggccttcacgagtccctttgagtttcagtcacctcctcatcagcaaactaagtataataacacatcctgtccaggttgttgtaaaatttaagttaaacggtttaggtaagcaaagctgtcagtgtagtgcctaacttgatagacattacttcttatccatctatctatctatctatctatctatctatctatcatctatttttcattggaaagtaaaaactgtctatatatggtatgcaacatgatgttttaatatatatacacaatgtggaagggctaaaacaagctaacatatacattacctcacatacttatttctttcatggtgagaacacttaaaatctactctttttttttttttttttttgagacagagtctcactgtgtcactcaggctggagtgcagtggcgcgatcttggctcattgcaagctccgcctcctgggttcacgccattctcctacctcagcctcccaagtagctgggactacaggggcccaccaccacgcccagctaattttttgtattttttttaatagagacggggtttcaccatgttagccaggatggtctcgatctcctgacctcatgatcgcctgcctcagcctcccaaagtgctgggaaatctactcttttagcaagtttcaagtacaagacatattgtttttaactgtagtcaccatggtgaataatagattgcttaaatttattcctcctgtctagctgaaagtttgcatcctttgaccaacatttcttcaacccctccatagcctagcctctggtgaccatcattctattctctctttccatgagttcgacttttatacacctcacatataagtgaggtcatatggtatttgtctttctgtgtctggcttatttcacttacataatgtcccccaggttcatccatgctgctgcaaatgacaagattttctactttttaatggctgaaatagtatttcttcctttctttctttctttcttttttttttttttttttttttgagacagagtctcactctgtcatccaggctggagtgcagtggtgtgatcacagctcactgcaatctccgcctcccgggttcaagtgattctcctgcctcagcctcctgagtagctggggttacaggtgcctgccaccacacccggctaatttttgtatttttagtagagacggagtttcaccatgtttgtcaggctggtttcaaattcctgacctcgtgatctgcccgccttggcctcccaaagtgctgggattacaagcttgagccaccatgcccagctggctgaatagtatttcgttgtgtgtttataccacatttctttatccattcatctgctgatgggcacttaagttgattccatgtcttggctgttgtgaatagcgctgcaattaacatgagagtgcggatatcttctcgacataccaatttcatttcctttaaatacctaatggtgatattgctggagtatatggtagttctttttaaatttttgagtaacggccacactgttttccatgatggctgtaataatttacattcccaacagtgtagaagggctcccttttcttcacatccttgccgacacttatctttcatgtttttgttaataaccattttaacaagtttgcagtgatgtctcattgtggttttaatttgcatttccctgatgattcgtgatatcactgagcagtttttcatgtatttcttggctattggtatgtcttcttttaaggaatgatagacattacctcttgtcttccccctctggctccacttcagacagccaagaccgtcaaatattacctttgtctcaagcaagatacgtttggaacccactaactttttctttcagattttagattacctctaactgctgttttgtaatgtagttgggcatgatgcctattctctagcctagcataataaactacataaagaaaagaaatgacatagctaaaatcattcaatcatttatattttataagctttgggtcacccctttctcaatgtaaccatgaactgttttcaaaggttatttaatcacttggtgaaaagcaaaaccttctattgcagaatacaaatagaaagggtctcaaaaggataaaacagttttttgttttgttttgcttttctttctttctttatgtatttcagcccagagtgtgtaggtgggtttggacttggtattcttaatgcgtggctcatagttatttcatcaggctgctctgaggttgtcctgtaatacattacccataaagatacattttgacttggtttttaaattaggttagatagagactgaatacttaagtcaccagggaacatgacatctgtcatacatttctcctctttaccttgatcccataacagctgttacaggtctcatgtacaataaatgtaatgtggccgcagcctgtcattacctctttccagatagtgattgtaaaatgcctgggtatcccttcaactttatgggtatgaagggtaactgagccaatgtagccaggccaatgaaattttaacactcatttccccaaaggcaaaaggccaacaacaggctagagttaaggtgctttgcttcatgaagtagaggccggtttgaaacatgaaatttcagatgaaaaatgaaagccaaagtgggtcagagttcttaattcaacttcaagctaggtggagaaatacattgacaacagagagccttacagatcagggtaagacggctgcatacactgagactgagacaaatatatgaccatggcaaaaaatagaaatttgcatgtcgaaggccaccacccatgcagccatccattgttctccatggttatctacaattacagaggaaaagaaatcgatgctaaaccatgttggaattgagttaggctcaatttttatctctttggtaactctgaattttctctcttcagcccatcttaaattatttactttctctttcacaatgtgagccatgaatattttgtttcttcattttgttaatttgccaattttcctttgagctaaatgccctagcaattttaatttttcattcgggttggaaagagcaatgacccttttttttccattattactatcacaggcctgggcccagaatactactttttatgaccagcagtgttgagcctataatggaattgcaaagtagagagtataatatactgatattgacttgtgttaaacccagtggtgtgatcactgataatatttatatgtttatgtgtatacatccttgcttttgttggcttgcaactaagcaccagagagaagaactagaaccataatatggatagattgtgaacatgagaatgtaaaaaaatgagagagagtgctatgtgaatagggcaagtgatataaaatgatggcgatagatgcaagtatgataactaaaaagttaagtatagattaaatttagatcaagcacatttaggattgtttggttggcatttatttcttagctaaaagaggacccagagacagatgggctactcatctgatgggctgagtacaaagacagatgagctgccgtggcacccagcacacagagttcgcttaatatctgagtttaataatattttccagctgtcaagcatatctgcaaatgtttgtttatccttctgttttttgagcacatgttcatggaggggcaagggcatggatggggttaattggtatgaaaatgtacaggaaccttgttttcaaaatcatttaaaaatctgattgctgctgccatgccttcccctcctaccctatgtaatcttgattgctgtgcaactctgtttacggctgtccaaagcggtaaaatgattttgtcatacttatcacaataaaaaatgaccacatagagtgtcaaccaaaaggcttatttatttgattcaaactctcttctcctaatatgcgtgcacagctcccattaacgttaatgtgaattacaaagaacactgaagaaggatagacccctttatctcattacttttcttggataatgaggtttagatttgttaacagatcagaacagaagtccagtggataaaatattggcttaacttttaaagaaatggatatgctaaaaggaactttcataggcactaaggtagaagatacactttaataaataaacttcattagcatttgaggttaaatatgcttatttaagatgctggattaataaaatgcaaaatatttcctaatggacctatttgcatactcatattaaataactaataaaatatattaatgatagttttattcatatacatgtaaacattcctgagttcctggtgggactgtatttgcctaatttacattgttccgtgtccaggtcaatgtcatgtccttgtgggatgtttacttaatactattagataatgacatgtatagatttaataatttgcttggggggcaaatggaatccgttctttgtttagtaccttttatctgagaacttcaatgtaatttactaacatccatcttcaagatgcatgagagatgaatgtggcaaatagctttgctttgcgtataataaagaatgagacactgagaagtgaagcagcctcccgagagcctgtgaactgatagtgatacaaaaaccccttttgacttttgttcctatggtgtcagcatctaaaaatgcatggacaccaaccacgcttcagtgtatactttcttacactctgtagcacccatacttatttttgccatccgttggattttcctgacaaggcaacatcaaaccagcaatttagtaacatgagatggttcctaatgaagcaaggagacctgaatctttgaaataataactgtaactgttttcctcacagaatagaaaagaggtttcccagaacaattaaaagcagataagagatacatacattgaaaaatagataggagatatacaaatatttcattgcacattgaggactattatctcaatcctgctaaataatatccaccaggattttggagacagtccaattttgcttctccagctaactgctgatcatttctgcacagtggccctgccacaacctcagcttcaacatgtctaaaatctaattcagaatctacccatctaagtcaccagctcatcctgactctcccaattctgtttgaggcactgccaggaatcccgtgatgtccgggatgcctcccccttcccatctccacccttccgtcagtcaacaatcttgatattcacaaaatactgtctcttatatctggcccttcttttccacttccactgccaccactctaattcaatttgtcattgataactggattgttgcaataacttactaactgatttgcctgctttattcatttcttcattcctgttcattctaggcatagctaccaatcattcgtttgttcagttattagatatttaatgaatgctttccacacaaaaatgcaatgtaacgtagtagcaaagagagcagctctggaactattctacttaggctcaaatccagctctacttccttctagctgttagtctttcatcttacccactctgtgcctcagtttcctctcttgtgaaattgaaataatagcatctacctaatagagtggccccgagactaaacgagataatagatgataaatgtctggcacatagcaagttcttaaaacataatccattcatagtattctgccttgggagccgagatgtttcccagttacctagtggttctcaaagtctgtctgtaccctaggatcatctacagagcttgttatagattcctgggtttcattatcagagactctaattcattaggtttgatatgaggcctgggaatcgctgatgattgtaatgcagccagtcccagggacctctagaaaaatcatactatttagtttggcattcaatgccctctatattctcgtcccagtttgtttgtttgtttgtttgtttgttttagcgtttctctctccaactttccactctaaccagattattcactcttactctcttcactgttacccaaaacaagctttgtgaagccttaagataataccatcacttagaatgaccgtcttcccctgaggcctgccaggcttctgaaagccacctcaagccccatctcctttatgaattctttgatttgcatttctctccttcccatcaaattttttcttacagtctgagtttttccattgagtacttcctgtaggcctgcttggtttttagttttgagtttacacatctgtctcgtgcccttaatgaaattgtaaattcctctaagcagagggacttcctctgcaatgtttttctctgttttggcccctaataatcttttgctgaatgactgactggtttatatggtgtgctaattggagtagatttatttggatattaatgtgttgtgcccctttagtcattcttggtaatagtattgaaaataatgaaaacagtggaagtggttcaaaaataagaaagagggtgagctgcattgggagttaattatttttttttaatttctgcttgaagaaaaggttgaaggatgagttaactggcaatagtaactagctgttctccatttccactgaggacagtgctagagaaaatgggccaaaatcactaacgggaagaaatgaggttagatataaaaaagaagacagttcttaagcactggaatgaggtttctgaacaggttgtagaattgacctccctgaagtactttaaaaataggaaggataaatatccatctaaaatgatatgaaaaagatttgccaatcagctcattatttgaatatctattaagcactactctctgggaaaacccagaaaaaaatgtacaacatgatccttttacttaaactccgtatctaattaagatgacccataaatatgaaatcattagcagtgaaaataggatttaaaagtaagagctaaactgttaggttatcaccataattggagtttaaattcggatatgtgcccttctctacctctctactcctgaaaaacctactccaggcctttttttcaatgagtgaattttcagtgtcctctttccaacagcatttctaggtaaaatggagaaatctctgatcttttctgaaataagttattcaatactattgagcaaacaactgctaagtacacagcaagcatgttgtgataaatatgaaactaatcttttatttttttctaacatcgtcttttattcatccaacaaatattgattacctaataagtatagtcttagtacttggttgggagataccacagtgaacaagacagatgtcttttcattatactcaaaatctagtgcccacaacctttcctcaaagtgtggtagggcatataagttgtaatattaaaatgccataaaattgactaaacccctttagataaccagagcatccttgaattacataaatgatggttaaaccacttgcagtgtactcagtaaagatactgaatagtaagatgtctggatttccaaccttaattctgtaactgccttcttgaatgaaagtttttcttcatctggaagatgcatacttcttacctacctgcaatatgtgtataaattatcatcatggtcatcatgtatttggtcactgattgaaactgattacagggtagatatgtctatgggctaaaatagaatgggattggttagctggaaagtcagtttcacaaagtgaaatggcactgaattcaggaaaatagaccaagactattaacttgtcaaaatggaaaatatagcctttaaatatagtcatacacatggtgccctttggtttgaattagggtaaccaactcatcccactttgaacactgaaaatctcttccccaggaaactcctcagtttaaggaaagtgggccagtcgatcaccctattctgcatacccaattttatctgatccttcctctctcttcttccttccctcaccattctttgtttacatgccagtgtatatagtcataaaaattctctgaaaaataaaatgaaagttaaaagtaaatatttttaatgctacaaatttaaaaaccatatacaacaaatttaaaatgtatatgaaagagtggacagtataaaaggaagcttgagtgaacttttctgttatctgagtttttttgtgctttctttaacttgagctgctgtctgttctcctaaggctttcttggtattagaaaaagccacatagctctggaaattaaagtagaaatgtctcagcagagaataactaaaagcagcatcccacttgccaacaaaagaattcttaaaaatattatataattcaaaactcaaaaaagaaagagctggagggaacatcgaccagaaataatggttgcaactttgattgcagacaaacccaccagcgaacagtaaaaaccctaattctagggcttttggtatgaggttcctcccattgataggtttcttctcccccagggactgtaattttccactttaaatttgaactctagtcaatgtatagtaaaaaatcaatatcatagatttgttctgctttctttatgcctcctggaattttcaaagtatgggaatgaacagcttttatgaaaaagatggactataaaatgaaagatggaggactttgaccaatttcctagacctttgacccagaaacactataccagaccaggatgtcattgtcccctccctagctctgtcatgtctttgttattcccatactatgagggcattaaatgtcgagtgatatgacgactatcgcacttttggaaaggatctttgacaggttaactagaacttgctaccagaatatttgtcctgtgtatcctaccttttcattttaattttactttgctattttcaatacagcttctttccctatattgtgatggggagagggagaaactcacagaaaactaaagggtaatccctttagcatttaacatttatacaaacaatagttcttgcattgttaaaaacgagcaaaggtgccaaagaattattccaacaaatgcagacatggggacatggtaagtaattctcatcccctgggctgatcaaactccctttcctgagagttgcaatcctttgatcagccttctaactccacctcacccagcatcttagtgtcaacaacaagctcaggccacactttatggagaagtcatggccaggcctgattcctctagactggcattagagctagtctggatcatcttggtattttccaccatttttgtcatcacttgaaagacaagaaccacatcttaccatttttgtgttctcctcagtacctccgcctttgccacattttcccttcctctcatatcctctcacatatatggcctcattttcaggttcctcctggtcctctgtgaactaaacacagagacagattgattttcaatagcctctcccgtgaccttggccagcttggtataaatgctttctacatctggcatctggtcacccagctacagaattcaataaaccagtagagcactgagcaaccatgcctcttaaacaaagcactacctccctagcatgtcggcttctactctggaatccgctcccgtagcattgcctagaatcctcagtcctgcatgagccccactctgaagtccatgttcttagactagagcactggcatagtagagcttgcttatttctgatgggccatctctagaacacttgattctgtctttcaaccctatacatccacagttgtaggacctttttctttgaaccttgtgtatcttatctgactttaaagtatttatctgtcatttgccttccttactgctatggtctgtgtagctggcagagtatacctggatggactgcttctagactacctggctgacctctctaagtcagcctctgtgcttttgtgtgattttcctcgccatttttcatcctggttagtgggactctatctaattcccttccccagtgattctacaatgttgggcaccaaatttgctgctgttcttgccttgctcatagtgtacattcaacaatggattgctgagctaattcttgattgtgagaaatccattctggaaatagtaactaacaatcagtttttacttacagctgcttccataggctcatgtgacattcaaatgacaattaatgttttttctcctgtagttttttttcttttttgcccaaaatatttattttgaaaaactcggccgggtgtggtggctcacgcctgtaatcccagcactttgagaggccaaggcgggcagatcatttgaggtcaggagttcaagaccagcctggccaatatggtgaaactaaaaatataaaaattacccaaatgtggtggcatgcctgtaatcccagctacttgggaggctgaggcaggagaattgcttgaacccgggagatagaggttaccatgagctgagatcacgccgctgcactccagcctgggcgacagagtgagactccatcagaaagaaagaaagagagagagagagagaggaagggaagggagggaagggtgggggggaggaaggaaggaaggaaggaatgaaggaaggaaggaaggaaagaaggaaggaagggagactcaaatattaattctaaaagagaggaacaagtccttgaacactaccttgatcactggaatctctgctggaaggaaccctcttaattttggaaataatatgtgttagaatgtactagtgagctctgctcttcagttttgcattttaagtgttaaactctaaatctaactgtctatcatgttttattccataagagacgtatcagcacatagggaaatagtggtaggttataggatgtaatagaaattctaatagactgtttaacaataatatggcaggcagatgccattttaatcagcattgtcattaacaactatcaatagagaggataagatgttcttctctttgtgaattatgatttatggctggcacagcagtcacgctgaagtatatttattttacaatatagagacattgattaaatgcacatggcatctcaaatccagttgacattttaagtcaaaattattacagacacacagccattcatttaagctgttgctttaaaaatgtgtctcaactgattgttaatggaagaaagtctagctgggccaatatttcaataacttgttcctttattttgctgatatacatacactgggggaaagctgcctcttttggccataccatttctggtgtataggcactaaagagaagaatactctcttaaatacatacactcagggtttctagaccactcagaaagcattctcttactagtgtaaaattattttttgttccctttccatagttctccctaccttctctgaaaatcttgctttctagcctaacaatctgcttaggaagtaggtcttaaataattgatgataactgtagctaaaacattaatatagtttagagatgatagtttttgtaatatatgttgccaatagaccagccacattaaacaataaaagtgtttgagtattgattgttgatttacaagattgaaggaaatagtaattgtgtctgagagtatattctttgattcattttcttatttatgtctttttaacctcaaaacttagatttttttaaagtttgtattatgaaataattttagacttacagtaaaagctacaaaaaatagcacaaagaatttccttataccttccgcccagattcctcagatagtaacattttttctgaattagctgtagcattctctctctctttctctctcttcctctctctctttccctctctctctctctccccccgcccatatgaatgtatatgcacaaatgcaggcatgcatgcatttttctcttaataacttaacagtggttgcaaacttgatgtctttttatccttaagtgtactttgaagctaggactatcactgtatcattttattatacttttgagataagtcaagagttggcctcaagtaaacctcaaaatagcaaaatcagaaattacaaacaaggaaggtggtaatttcaaatatgattacaagtcaagaaaaccatttttgtggggtttatcactatctaatctaaaaacataaattaagtcagtgttgactcctggtaaatgagtacagatttccaagagcgaggtgtacttctttgacaattaatgaaacttcagaagtaaacctctgtaaataggtgcaaatatccttgtgataaagcgtcggtaaccattaaatttggtgcagagtgcttgaatgaaatggtgaacaggaaaatatcctgcttgttattgttaaaattgtgctgcagaaggatccttagaaattgaataccatctctttctcagacttgttatattttccattttactgcaaatgatttattgataagactggagggaaggctggagaagccataccagtctttgatcaccttaggactttttcttttcaacacctattcatttgaaaacatattttgaaaacataaatgcacaaagataaatgtattatgaaagttatagtggattcatccaagaaatttatactttgcctagtcaggaagagtggtctggagaaacagagcatactctgccagtctttttatttacatctgttaggtagttggggtgtattatgttggagtgaccactccaggtcaaagtcttgtgtcttgggaaagaagatgaagcacagtaatacaggttaggtgtagctggtggagggtgttgggatgcatatctgttgaggaccagcactttattaagtccccaattccctgaacattcacgccagctcttacaaaaaacaaagcagtagtatccatgtgtgttcctcatcgctggcctgtcccaaaattttatcaatgtgatgataacaacactcgtgcacatgaccacatattgctgaatttgtccatatagctaactggagatagtttgattctgggtgaaacaaacaaacaaaaatatgaaggagtagtaacgttctacagaatccttttcttccttctctgtgatgagatttaattagatagagctgctgaaatctgttctgtgcttgtgagttaaatatgtctttgaatgtctgtgccccaaatatctcccatgtaaaatataatacaactttatgaagcactttgaaactttcagccaaaagaaggaacgtgtgttgttatatcattattaacacctcttttttttttttttttttttttttttttttttttttttttttgatggagtcttgctctgttgccaggctggagtgcagaggcatgatctcagctcactgcagtttccgcctcctgggttcaagtgattcccctgcctcagcctcccaagtagctgggactacaggcgcccaccaccaagcccggctaattttttgtgttttagtagagggaggggttcatcttgttggccaggatggtctcaatctcctgacctcatgatctgcccgcctcagcctcccaaagtgctgggattacaggcgtgagccaccgtgcctggcctaacacccccttttaacattgttaaaattaaacaggtagatagcactgtaagtgttttaagaatgtggatatgtcatcacttttacagcttaactgtatgctatcagggttaatggtaaagacaatgtctagaaaacaaaccttatgtttccatgttcttggagaatccacgtgcagttacacagtattcatgaagcacatgtagagctcaacttctaaggtacagtcctgagattacctaaaaattatgtacagaattttaattatgagtatgtgtatttttgtggagaaagaatccataatgtttttctaatacgcaaaggggactatgaaaagaagctaaggaccattagataatgtaatctagcctctgtagactattgatgttccctacctgacaagtggctgatgttcttattcagccctctgattctttccactaatgtagtcaacatttagccctgaaggatacaaatctctgtcatgggagtaaaaatgtaaccctctgtggaaggaataatgagacataagagtgtctatctcaacacctttcatgtctcagggacatcttcgggataaatcctggtttggagataagtgcagtgttatgtctactgcagaagggtgtttattaaagattgtcttctttctagtactctctagctagatcccatcaagtgtaaaccaaatatagccctccccaacataagaattatgtttgtttttggtgaagacttttaatgtttgtatttacccatgcttttccaggatatcgtcaatgctgaggtcttctctctgctgtcacaactcagaccaaggaaattttaagtatgtttagatactttcttgagtttcataccccaagactgtattacacaccttcttttgtcaggggctttacagtgtctaacatagctaggctgtaatatcatacctggccattaggtgttgctacgtcacacactatgctgcaaactgaaaaatgatttagtttagaatttaagaatctgtaaaataaattcttctattacttttttaaatttatacatttaacatctttaatataagtgtacttgaagtaagaagtgggtatgctaaaataaataaaatatatagataaaggttacccatataatttcagtgtgattgacaatttatgcttagcctagtagaacaacactcatttttattaaaataaaagattaatacttctttaaaaacaaggatgtcctatttgatgcaaattactgttcaagaaagtaactgaaatttcctttcttgaaagggcaggccattagagatataaatagagttgcaggttaatatatcaactttctctttaaaattagtaatgtttaaaaataaattgtttcatttccacctagatcacttcctccttcttgacactattccagctgtcatattctgtgatattgttctctcagggcattcctgttagctttctggcagctactcctagctattcatcttattaaaagttgtcattccctatacctctatacccagtcctcctctcttctaaccctcctctctctttctctgggagagaaagagagtctgtaaaccagactccacccagactctggactcataatacatgatgcttactaaacggttttcccagatggtccgtaggtaccccaaaatcaacctgtatattatagaattaactttgcttgtttatccttaccaaggctatccaataaatcaagaggatgctgtgtccttttctctcacctgtgaagaccaatccatcaattcgttaccaagttccacaaattctactctctaagaatctaaattctctctccatcttcactgcacttccttagttcaaattctcctaatttctccccaaattaaagcaatgaccttctgaatagtcttgatattctctcccagcccacttactacagtactgcccatctgatcttcacaaacatatatttgatcttctaccaaaatttttgctgtggtttcacagtttcttgaagagcttagatttctgaggtgttatacaatgttcaacctttatacttttatgctgccatagataagtacataaaattatcataatgtgccatgacagcattaaggtagtcaatgccttgggcttttcatattccctgtgactacaatgccctttccccatccttcaatccacactaaccccgtggtcaactcttagtgatgcttaaatgctgggttcaagggttctttggaagccttgctgacaacaattctctccacactcagtactgataaagatagtttactaatatcatctcattgtttattagtagtagtagtagtagtagtctcagagtcttcctctattgcccaggctggagtgcagtggcgtgatcataactcactgtagcctcagaccccagggctaagtgatcctcccacctcagcctcccaaatagctgggattgcaagtatgagccaccgtacccagcttcatcctattattttgagtaattagacatcctatctagtaataagataagtaattttactggtgtcactttggaggtaactggcttcagataaggttattgaatttcatagtccattatttcaatttacctacaattatcagggcaaatatatagaaggaacaaaattgaaaaacaaataaaaataaataaaacaattgtgagagcaaataaacacaaaaacatcctatcatcgtagacttcattgcctgtgtatcttaatgtgaatatcatgtactgttttatcaagctttaaatctgaggaaatggaatctgtgaaaactgcctaatttgttaatttgcatgtgaagtatactgttaccagggaagggtgaaaaacggatttggcgcatgtagtttactaactctgagaggataactggtgttagtttctgctgctgtaacaaaattgatttggcctttattatacctcctattagaaaattactgtgaaaaaccgcatactgaaaatgtgagagcgctttgtaatgaagaatacattttatgtagcaaagcaggaagcagtgacaccaagtcttaatgacactttatattctgccagtgtacttagacacaactttctcaactgcataatctaaagtaaacaaaaatcttattccattagggacacaatttgacaattgaattttttggtgaacttttggcatccattgaaagaattggctgcaaccccagagatggggttaatctttttagggcatcattgcctggaaagtggaggagatgaccaagtcaggctctaggagtaaaagcattatctctatgagctagaacgaaggagttattcaacagttatcatctctatgaccactttttattcaattgcaagagcacagaaaggatattattttactcaagaaaattggggaaaaaatttacaatcttagtatgctgaggcttgatataattaaatgattaaaaggtaattaaataattacctttgtattttaataattccctatagtcttaggtcaaatctatgtggaagaatatcacatatcctaatgctgacagtatttgctgtcacatccacccagtttggaaaagggctcttcattaggggaaataagtagtacattcttgtacagtagtaaatacttatcatgtagcaagacagaataaaaatcaatattaatcagactagacaaatgcttctagtataactgaaattctcaagccctaagccctaagtgttctcttcggtgctatttattactaaaatatttgctacttctgacaccaaatagttctgtaatgtagggtctttaacttttgatatcttagtctgatcatcagaatacccagctctatcactgtatgtgttcttagggagaatatgaaaattttatttaaagatcttcagcatatacatgactgctattttcttaccttggcatcccacaatgaagctaatggaaaggtttagcaattctatgctgttgctcatttctccctgaaactttgactattcagcccacaatatgtctacctgtatgctccactgccccacctttatgaagatatggctgtatatttcagcttttcatttttatcgctaacggggacacacctgttcctaatgctacctaagattgtgctggtctttggtacattatagaggtaggaatagtatctaactcccttatattattagtgtttactactttataggtattgaaactgttctgagttctgtacatttgttaattcatttaatcttcacaataatcctatgaagtagccactgttattatacacatttgacagatttagaagctgaaacataaaaagattgcttgcccatgggcagatagattctaaacggacagaactggtaggatttcaccccagcagtctggcgccatactcctccctttttttactctttggctcttagctagctgggcaaacttgggtaactttaagctactcaactgctcattttccttttcaaacaaagagaaagagaggaataagctccacctcatagaattgtggtgagaattaaataatacagtgaatgtaaaatacctcactgactggtacatagtaaagtattcatgttattctttttcttattactatcaagcaatcaataaaagtcagatgaaggaattaactcatggagaggcataactcagaatcactaagttgatccttccagggtccatttttattttttctgttgaaaagctcatttataaagaatggattcagtggtctagcttggcctctttcctgaaagcattacgtatagggatcaagcactcttatgctttcttcattaggctaaagaaaaagctattataacaaaaagagattgcatttctattaaagcaattttaccaccaaattagacattttaaagaatatatagaatgatacatggaatgctatcagttgtcaaaacccccaatatttccaaagcatatatgaaaataaaagtcagagagaaactcattttatcatcttttaatcctaatgccctggttttccatttattgcattatgagattgacattatatcattatctcttattgtcaccttagccttgtaagctttagatgttgctaatgttatggtaataactgctacaatttgcaattttcagttgtattagaccttgattcacttttttaactacctcatataaccatcactgatttttcttgcagataataacccccttaatggtttttataagtaaatatcagtacaaaattatcagagcaagaaaatcaatattagaaaacttcttatattaaaaataacagaaatagagtaatattaaagtaattctaaatattcaaaaatcaaatgcatgagttattttgaaactagtgttagaaatttcatgatttggaacttgctagttcactgttctttttcgattttactacactttaaaaacactgtaacctatttttaaaaaattaaaaataataatacatatgggatcaccacagagctagtgttttttagaatgttttcctgtatttcacacaaaccatctctttccttataattaaaagttgtataatattgttcttgaaggaaccatatcatatgtcttctaaaaggccagtatgttgtgtttttatttcttttggttaaatgggccctaaagatttatcagatattaggaatatgaagtggcacagcagacggtgaaatagtatatcttttctcaaactttttcctcaatgcatttctactaccaatcaaaatcctgcagtccaacctcctgtaggaaattaaatctttgctaaataaccctattggcgaagctcttctatttctcattccccctgctccttctctggcatgccattcattcatctgataaatatttgttgagcaccaagtatgcacaggcacggggtacagtgatgaatgagatgcacttctacccacagagaacttaaaatatagtaacttgtcactgactaccttatatcactagttatttttcatgtgcttatgtcttacagagagcaaagactacaatttaaaattattttactttctgtatacctttcatctagcaagtgctcgaggcatatttagttaaatgggtgaagtagctcctattcaagagagaacagttttggggcaatattcacccactcctaagctagaattatcacatatggtaagacattagcacatgccattcgactagcttcttagctcagacagtggatgactttcaaataagataaaatattagatcacacaccatgaagaactcttgcaaggtaactgcagcctcagtgcatctttgtccatctgggttatgactctgtgaaagtaagtgtaatgacagagttgaacagacattcagatgttaagaagcaacatgcggtaggctagagttttgagaaggaattaagggccctcctcattggagtttgcatcctcagaagattgaggaaatatgtataagaaataatcatggccgggcacagtgtctcatatctgtaatcctagcattgtgggaggcagaggcaggtggatcacctgaggtcaggagttcgagaccagcctgaccaatgtggcaaaaccccatctctactaaaaataacacaaaaattagccgggcgtgttggcacatgcctgtaatcccagctactcgggaggctgaggcaagagaatcacttgaactagtggggcggaggttgcagtgagccaagatcgccccattgcactctagcctggacaacagagcaaaacgccgtctcaaaataaataaataaataaataaataaataaataaataaataaaataaaataaatcattaacgtaggctgggcacggtggctcacgactgtaatcccagcactttgggaggctgaggcgggtggatcacctgtggtcaggagttcgagaccagcctgaccaacatggagaaaccctgtctctactaaaaatacagaaattagccgggcatggtggcatgtgcctgtaatcccagctactcaggaggctgagggaggagaatcgcttgaacctagaaggcggaggttgcagtgagcgaagatcacgccatggcactccagcctgggagacagagccagactccaccccaaaaaaaaaattattaaaatataaaaattttatgaaaatactagaattaatgggtgttggactcttgctagccttggcttgcaacaacagccagccctcagggctgtttgatccagtctccttgcttgggttaacccagaagacagcagggcataggctgaggcaactatagacctgactctgtagctccagggaagcccatcctgtgtgttttcattggtttattttcatttgtttgctcagaggaaagtttcagaaggcatttcttttggggctacattacagcccttttagttgtcatttaaaagagtatgatttcaatttatgacagacaatcaatcaagatttttgttttaaaatgagcctatgtgacctacagaggaagtggtgttagaggtgggacagttcttaaaactggaatttataaacatttcagctttactcccaagacagtgcggagcaagaagggttagagaaaggagaggaaggaggtagggaagagttgggtgttaatttctaaactataatgtggttccttagtcgtttctcctaaagcagacatagttttattgagggccattcatgggcaaacctagaccaaagccagtgacttctctcaaatggatgtttatttctttctctcttcctcgacggaaaagaaaaagcagaaagaacaatggggaggaataggcatgcaatgtctgatattgctttagtgttggcgaaaaaggcagcctccctccacgcccaccacaagtacatacacataaacatatacatgtgacgacatatgcacaaagacagggcaaacacaagtttacatacatgcaggaaaatgggcacacacatacaaacacacacacagacatgtgcatacaaacgttcacagatttacgtgcatataagcacacatgcacatatattccacacacacacacacacacacacacgtacacatacacacacactccatagatgacagatcaggtatcaatgatcctagtctcttaaacccctgagcaggcagtaggagtttcccttttcctagaaacctaagccagaagttctcctcacagcctcatctgggctagggtggaggtgtgatgttctcacaggccctttccacccatcttttctgttcttagaaaagcctgtgttgggccgggcgtggtggttcacacctgtaagcccagcactttgagaggccgaggcgggtggatcacctgaggtcaggagttcgagaccaggctggccaacatgacaaaaccccatctctactaaaaatacaaaaaattagctggacgtagtggtgggtgcctgtaatcccaggtactcaggaggctgaggcaggagaattgcttgaacccaggcagcggaggttgcggtgagccaagaatgagccattccactccagcctgggcgacagagtgagactccgtctcaaaaaaaaaaaaaaaaaaaaaaagaagtagagcatttatatttggccaggcacagtggctcatgcctgtaatcccagcactttcagaagctgaggcgggcagatcacaaggtcaggagttcaaaaccagttcggccaactgtgaaaccccatctcaactaaaaatacaaaaaattagcctggtgtggtggtgtgagcctgtaatcccagctactcgggaaaccgaggcaggagaatcgcgtgaacccgggaggtggaagttacagtgagccgaaatcgtgccattgtactctagccagggtgacagtgccagactcggtctcaaaaaaaagaaaaacaagaaaagcctgtgttgatatcattgtaatataaaagatagtattttctgtgggccctctgtcagtctccaactttgcttgcctttttagctaacacccttttctcacatcatctttgctactgtatagagaggtgtatatgttgtgagtgtctttctcatttataacaatccatactcgtaaactgtattcctccatatttcctgaaatggacttgaagtttaaggagaggtgttagagatggacagttccaactagttgaagatctccccaagccccttttatgggagaaaaagagaaggaaggaagggagaaaagaaaggaggtggaagaggagaagaaagaggggagggagaaagcgctctggagagaggaaagagaaacagagagaaatgaggagaaataaggagaaaccaaagaaaatatttgtggtcttctactttttgccattccctacacttttctgttcatcgccacctatcctgagtagtggcttgaggagcttttgaggggtttgagagggaggttgggaagctaagagcattcaagacggcttcccctcttctctccttcatctggattaaatgcatccagtatgaggaggagggtgcagagagctctcccttccctacctacactaaatagtagtgtccacttttcactgaaaacccacagtgtgcaaagtacctagttagggaattgatactatgtttgtctctaatcctccccacagccatatacaaggagggtattattatccacattttatatatgaggaaactgaggcttgaattagtgaggttagtgattcattccttagctgttatatagcagagcagtttttctattttatttttatttaaaagatttaatttaatgagtagtaaacagattaatagaaatgaataatagttaactcatgaatgtggtttaagtttgtaaagtaaaacaaaacagaacagttttacttagtagaggggttttatgaaagtacatactaccccagacaaagaaaaaaggagagggactgaatctgttgggtaggtgagaggggaatgagaaaagctctgggggaaatactctatacgtacattgtctaatagggtagccactaaccacatgtggcttttgagctcttgaatgtgacaggtctgaattgaggggagctaaaagagtaaaagacacattttagtataaaaaaagaatgtaaaatatctaaacaaattttctattgcttatatattgaaattataatatattagatatattgccttaaaatattaaaattaattttacttgtttccttttacctttttaatgtgcctaatagaaaattaaaagttacatgtgtgactcacattatagaacataaatgtttatacttgattcctaaccaccctgggcttcttcctagtgtggcactcagagaggaggatatagggacacagccaattccatcagagaaattcctcttttgtttgtttatcaaatcaggtttctgatataaacttctttgagggaaagaatctacagccaaaatgcttgacaattctagtcttagaatattttccatgtaccctgaagacgtggaatgagaagaagaaacccagatacctttcttttcctcttatcactgtatcccatgcattaactagaagggccactagatctctctatgattccctctaagatggtggtgggcctgtttttttttccttgttattctggtatgtcaggagttcatcaaaggtatatttgttactgaaattttaccccttttctgtaggttgcagaaatatatttgtgaaagggaatgtcttttaagtattcctaattgatagcatggagagaaccaagttacagatggtctttattagaaattccttctcttttggaaaatgtagacctctttttcctaccccgttagcaacagtgattggagaatgattgagtggtctcttgtggaaatatgtatttacctatgtaaagatcagtttcaactcagcacattcttctttaactggtggactaacctgtaacctctaaagggtgttgacatctcttcagtttataactgtgtgtatgtgtgcatgtgctcgtgcatgtgtgcaagagtgtgctctcatgctcatatttatgtttttaacaataaatccagctgctaacttagagaaaagcttttgaagctactttgtagattttaattttcttaagaataaataataatcctggccatttgaacaacccatccccccaaaatgttagcacgtggtcacatacctgaatgtgcaagatgaattcaattcaagggtgacagaactgatcagaggaaaggtaagaacaaatgcatgctatgaaaaagccattgatttccctgacactaattgtaaccaaaaataacattgtaacctcaaagggtatttgtatgtgtttgttgtcagagggcagatataggaacccaagatagagcccagacagtttcttagttagaatatcacctctgctttttgaagtcttacaatgtttctttctctatggccttttcatttggtcctccaaaaatgagggtctgttgagtttcctctgatgagttttagttgtcctgtggaaaggaggcattctgatgtaagaaagttttgcttatcattagttgaatgcactttccatcctgcaaaatgttaatcctcagatcacaccaaagtgaaggacaaagcataagtgagaacaaactacatcaagtaattctttcctcatgtgtcttttacctaaggcagatgtgcatacttggtgatacaattgacacattcctccctcaaatgtgggtttcatacgtttctccatgatcaaaaaggaaatcattttatcttgaagttgtaagagaagcatttattttaccatccttttaaaggcaagagtatctgaaatttgagataaggaacaagcctatagtttatgcccctcccttccgttcatcctttccaaagcaccaacagttctagaggccatggggatttatatataaataagtccctctcatggaatttataatctgtgttgctttgatccaatccaaatataagcattagtagccatgccactaaataagtcaattccaaacagttatgcctgccccatctttggaacatggtgggaagtctcaggaacagacagcaaatgtctacaatgtccactggctcttgtatatctctaaggcttaccatcatgctttctgaaagtccctgctctcaggaactcactatgctcgttgtagaattgtctagcatgttgacagtctcttttctgtgtgtgtctaagtcctacatgccatgtgtatcatggtacctgtgtgttgcactgaagtgccatgagctgtagtaggaagagctttggcaccaagaggcaagagatatatgttttaaacgtggctgttccaacatgttggatcatcttgcagagccacataacactgaggtttatagagtccattttcatgctgctgataaagacatacacaagactggggaaaaaaaaaaagaggttcgatggacttacagttctacgtggctggggaggcctcacaatcatggcagaaggcaaggaggagcaagtcacatcttacatggatgacaggaggcaaaaagagagagcttgtgcagggaaactcctgtttttaaaaccatcagatcttgtgagactcattcactatcatgagaacagcacaggtaagacccgcacaggtaagaaccatcagatcttgtgagactcattcactatcacgagaacagcacgggtaagaacagcacaagtaagactataattcaatcacctcccgccagttcctcccatgacacataggaattgtgatagttacaattcaagatgacatttgggtggggacacagccaaactatatcagtagagacaaggtttcaccatgttggccaggctggtctcaaactcctgtcctcaagcgatctacgcacctcggcctcccaaagtgctgggattacaggtgtgagccaccgcatccagccaacccttctctttaattaagaatacttctctaagaaccagcctgagtaattttgggtaacttcatatgagtgagaatatatgtgatatcaggattgtgattatcataccatttgaccatgagttcccttttcatctgcaagtcaaaggatagttatttctagggcctttttcccttaaagactggaaagtctgtacttaaaatgagcaactccattcctgatttttacattggacttagaatctctgatcttatttccccaggggcaacatttatgcgacttggcttgaatttcttcctctttccttctcttcatttcttcactatgtctgcctttaaataccacttaaggtaataacttgttgcacagttaccattctttatttcttctgcaagagatggtcagatcttctttctggcttccacagtctggtgaatttgggacacattcatttgttcatggcccaaacatttgctaagtgcctattatttcctgagaaatgttagttaatgagccctattccttgctcttaaggagtttattttctaatggaaaaggtaaacaaaagcaggtaattatgttacagtgcacagtaaccattaagaagagatgaacatgtgtgcaaggaccctaaatgccttagctgggtgaagaaaaatggccacttttaagaaccaagttgcaaatgtaggcctaggtgcaggattaagaccatgttcactttgcttattagccatattgtcagtatcttaaggaatacttgtggggttggctctttccttagtggaacatctttatttcttgtctactttttatttcttgtaaaaaaaaaaaaaaaggtaatctaacctaaccttttctaatgtaacctaacaagtgttattttttaaaagtatttttaggttctttgtgactacatttttgtctttccctagacagtggcttcctaattagataacctgtatagacaattccaaatttagcagaaattcaaccaaatacatgcttcacagtgcaaacaccagcaacacctttcagcaacacagtttggtgaagacatgcctagttgaaagatattttgtgacttgaggtttatttaagctaataagtaataataatttttggagcctgaacagatccccagttttagcatacttacatcttctttatgtctctatgtattttaagtttctaagtaactgttcatagatgtattttgaacatggtttcctagatattgtctcaattccaattcaatatttatatctgttggaaagcacatgcactggaaaaatgttttggcaactgttttcattgactgtaaatcatttattagatagagtgttgttaaagttgaaatgccaaagttgatctaccctatgctctttgactttttggttgttacagataaaaagagattactctgctgagagtactaattttacttaaaggtccttttggtttgcatattaaatatgtcattcagtctctcccaagttaaatagagtgtgccctactgttactttgaagttaaatgaagttattttctgttttggtgcataagtaaatataatcataacttactttctttttgtaaatgaggttaataagtgcttgtgtcaaaaaatagccagtttatgacattttagttcatttattttagatataattaccaaatcagtgttctacttttttcttcaaataacaaaatgctggccgggcatggtggctcatgcctgtaagcccagcagtttgggaggccaaggcgggtggatcaccaggtcaagagttcaagactagcctggtcaaggtggtgaaaccccgtctctacttttagttttaatacaaaaattagccgggcatggtggcagacacctgtaatcccagctactcgggaggctgaggcagagaattgcttcaactcaggaggcgaaggttgcagtgagctgagattgcaacagtgctctccagcctgggcaacagagtgagactccatctcaaaaaaaaaaaaaaaaaaaaaaaaaaggcttcatgaggtgtttttgtcatctgtgatggggaaagattgtagcatccaaccaaagagctataaagaagacagtgttgtacagtttatgtcttggtcttaattctaaacttcccttccaatatgtgcttatggatgttttaactcatttttcgtttgtttgtttccactttgtcatctgttcccattctttaatattactttcatttccagctaaattgttaaactccagttacatggagaatattaccatgggaaaacatcatttaatttatattctatctagttctggcaatagcagtaatacataatgtaacttctcagtgattctcatgtcataatttaactagctttgacttttactgggagtaagcaccctactctggaaaatccatttcataattttgtgtctcaatgctatcatgtagctaatcagttaattgtaattacttctgcttaattcacaagaattctgaaaggatgtataataataaaatattttatcatggaatttgtctctgataaggaagtaaccatgagaaaacctattcaagtgggaatataattctataaacctaacttccaagtaaccagtctttgttgaattatagtgaatttccagatagctttgtgtctcagaggacatgggttggagttctatagctgaaccagcattattttaggtattacatgaggaagcaaccataacaaattgaacaggtggtcctgggaaaataagtctggaaaaagtccagagattggtgggggaagggggataaaatttaactaatggtccaatgaaatgtatactaccctggataggcatatatctctggtagcctctattaacatgtaaaatttgtaaaattcgcttgaagtttactgaatatcattttgtttcaagttgtttcactgaaataatcaaacttgaagcatctcttgatgtaatgataactcaagtttatatagtatttttttgttttgaatatcagttcatcatctaagaaatatcttaagtcaaatattagtctattttaccacaaaggaaaataaaattttaatgatagtaaagttatcaacacaaaataagaagaaatagatcaaatgcagtgttattgtatcaagatttaaaaatataaaactgtgaattaattttaaaaaggagaagtttagtagctcaaatagatttacaaaaataattgacacaactcaggtagtgattgaggtggtttggccttcagtggtttacttctatgctactaaaagtgtggtctgtggactagcacctgagaattggtagaaattatctgagaacccacctcaagcttactgaattagaatttgacaattggttttaactagtttttcaaatggtccacatgtaatttaaagtgttggaggtattggcttggttaaatgtaatgttaattttagtcagtagtgcagcaacatgtctgctaagaaaaataaagtaagcatagatggagttcataatcacatggcatccagagagagataattggacttcctatcctgctgactttgttcagttacgggcgctataagttgtgctttaagaacatgcaacaaggacaccgaccgggatggtgaccaattttatatagagaataactgaagaaacaaaacatttgacctggagaagagaaaacaggagagctataattgctgtgttcaaagattccaaggcctgtcccttggaagacaggggagaaggaggcagaagtaaagcaattaatatagacaataaacaggaaaatgtatctttttaaaatctaagatgaactttgaaacaattatgtgtgtcctaaaagagatcttccttattctaagtagagagttatattgctgaatatttttaagtagagactgaaaaaccactacctagaatgaatccccctgttaaatgctctctaagctccttgtcacaaggtaacaataggagttgcattgaatctatagattgctttgggtagtatggtcattttaacattattaattctgaagatcttatacagtattattctgtataaaggtataaatgaaatagaaaaattcctaaaatctacgtagaaccacaaaagaccctgaatagtcaaagcaatcccaagcaaaaagaaaaagctggaggcatcacactgcaacttcaaaatagactacaaagctaccataaccaaagcagcatgatattagtataaaaacatacacatagaccaatggaacacaatagagaacccagaaatgagttcatatatttacagccaactgattttcaacaacggcatcaatatacattcaggaagggacaccctctttaataaatggtgtgggaaaacttgatatctgtgtgcagaaaaatgaaaccaggcccaaatctctcaccatatacaaaaattaactcaaaatgaattaaagacttaaaggtaagatcccaaactatgcaactacttgaggaaaccaggggaaacagttcagaatattggtctagtcaaagattttatggctaagatatcaaaagcacaggcagcaaaaacaaaaatagacaaatgggattatagtttactgaaaagtttctggacagtaaaggaaacaatcaacagagtgaagaggccactccactctgggtgaaaatatttacaaactgttcatccaacaagaaactaatatccggaacacctaaggaggtcaaataactcaacagccgaaaaacaaatatccaattaaaatgtgcacaaataagctaaacagacatttctcaaaagaaggcctacaaatggccaacaattacattaaaaaatgcttgacattactaatcatcagggaaatacaaaccaaaaccacagtgagatttcatcttatccgagtttgaatggctatgatcaaaaaaataaaaaataaaaaaataaaaaatgctaaagaaaagggaactcttagacactgttggtggggatgtaaattagtagaaccattatgggaaacagtatagtggtttaaaatctatattaaaattaggactgccatgcaatccaacaatcccactactgggtatttttaaaggaaaggagtcagtatatcaaagggatacctgcacccgcatgtttaatgcatcactgttcacaatagctaagatatggaatcaaccaaaatgtccattaacagatgagtaattaaagaaaatgtggtatatatacacaatggaatactattcagccatataaagagtgaaattctgtcatttgcagcaacatggatgagcctggaggacattatgttaaacaaaataagtcaggcacagaaagataaatactgcatgttcttatgtatatgtagaagctaaaaaaaatgtttaagctcatgaaagtagagaccagaattgtggctattagaggctgggaagcatgggggaaggagagggtagggagaggttggttaacagactcaaaatcatagcttccgacagcactgttggttaaatgtggttaactacaatttattgtatatttttcaaaaacctagaggagaggattttgaatgttcccaacacgaagaaatgatgcatgtttgaaatgatggatatgctaattaccctgattttgtcattatacattatatgtgcatattaaaatatcactctgtattactcctaaatatgtacaattattacacatcaactaaaaataaaaggaaaaataggtaaataatatataaaagatacagtaaaaatacaatattataatcttatgggaccactgtcatatatgtatgtggtccctagttaatcaaaacagcattgcatatgactgtatttctccagttttaaaaattactcattgttccatctgggcatggaactgtgtctgttttatccactgtctgttgtatcctcagcctctagcacagtgtctgacagaaaatgtttctgtatgactaaagggaggaaggaatagatgggagggaagattgaattcattagtatattcaattaatatttactgattgtctttgatatgcaggcactctgataggcattaggaagatgtaagtgaacaaaacagattaatatcccgtctctacaatttaatttttctgtggattagtttcaataacctataagtagtttatacagaaggagaatgaagaacaagaatcagatgtctactagagcaacacatctttaaagaagtaaacagcttccaaatatctcagagcaaccagaccaacatgaagtatgttgaagttgacataaaatagagatttcatttctttgttttaaaattaccttgaatatgaagttaaaactcttcatgtgttataggctgatgaaaagcttagacaaattactaaaactttggagactgcaagactccaaataggagcaacatgaggtagagcagcatatgcagctgtatgaccagagaatttctgagaatttactctgatttcattgtcagtgttttatgttgtgatttctttgattacatcatggtattattagtgatgttttagtatttaatattagaactactttgacctgaaaaacgtgtcctaaaataccttattttacctgagttactgtgttctttgaaccttattccatccaggtgtcaacatttttttctcatcaccatgcatctttgattttataatgtaagtcagtgagaaaacaagattaatttaacggaaaattgctttccacaatcttttctggaatctcttttgtctgttacccaggcaatatctatattattactttgtcctcaaaagcttttaccaatttggcaacacagaatgactaaatctcttttcctttatctggcttttcattaggaaggaaactcccaaaattcatttctatcagcattatcctcaatgctaaatcttgtatgtctcaagtctgtttataataaatatcctcattatgactaaggtcgtcttacttctctgcattacttcagtttctaatgaaagcaatgcccaagtgactaagtggatgaagcccccgactgtaggaaagtgttcccatcaaatatctcctaattgccctcaatgaatcagcttcaggctcagccttatctctggcaccttccccagctttgtgttgatagccaataacatgtgctccgagcatgaaggagataaaaatggtgtgactcttagaaagccagccatagagtggagttagggagctgtttagattcttgacttcatggtcctgatgtgattgattttcaccaatttgccttcagacatgctttgctatcattgcttcaaacacgtaacttcagatcctacagggaaacttgtgctccttcaattgtttctgctgccttacacataggtcctgtgttaagacatcttgtattcatcagcctccaatggtaactttaggcaagtaacataagcactttctctgaccatctgtaaaattaagtagtaactacaaagcatctgacacatttcttataaaagcacagtccagtcaccctggcctggctcacagctgtggagaacagcgtgcttgtgtctgagcctcctgacgtatgttttcttttcagtccctctgccccctgccttccttaccaccaccccccacccacaatatcttctctttctctctttaactagttctcctccaccctcaccccctatgcctgaccctactcctcacacctgctttggccccatataatacaggatgttttaatatactatgtacatggaagaaaacggaaattgaagttgccagccatgaactttcttttcttttcttctcttttaagtgggggaagagtatcgtcaacagcaaggaggctattttcttagtgacagcagaaaagtggtagggggttagggaaagaacacttaagaaattagagcttccagcggatacatggtgtttgatcttttaatggtgttgctgctgggcctggtatatattttatcatgggagatggttagaaatctgagctttgaaggtgggaaatgtgtcagttggtttgtgtgtgtgtgtgtgtgtgtgtgtgtgtgtgttgtaacacagagtacgccacagagaccaaaagccgtggaactgttaaaagacagagacatacaggcatgtggatatggagtggatgaggcacacagacacatattaaatgagaacctactagtgacaccctgaagagagaaatgaggtaaacaggcatgatactggagggagagggatgatagatcagtgaaatgacttctatgcttcagccttccagtatcacacaggctgtgagcaactcacagactatcaacttatgacatcaactccttggcatgactttggacacagaattcatgcagtctccacctgtcccaggtagtccttgattttgtgtgtctgacttcaacccttttctatgggcattccctagaaatgcggaacatactcttcaatacctcagctaacaaatgagcatttctggttctcacccaggggtacatactgggagccaccggttttatttctgtactgtcagccttatggtctttccagtagagtttatgtatttatttgaagcttttagggcattttgccctcacttaagctaattggactatatgtgaaattgcgtgggtatagcgggggtagaatgccaaagaacaggcataaagaaaatgttctgaattctggaaatatattctaaaagctcacgtctgaaagttgggtaacgaggaattttatcttttaactcttcctcccccttcatagcatttaacttttgtttgattttcacattcaaaaagaacaattttaatgtatttttcagaactaccaacagggccagcataaccatggagctgaaaacagatggtttggttttgcaaaggagaaaaagtgatatcttttcctcacccatttgcaaggttcatggttgagatccctaaagcaaaagacagattaacaagagaaaagcatacatttagtatacattttatgtgacacaggagccttcagaagtgaagacccaaaaaaaacaaggaaccttatgtacttttatgctaagtatgacgaagtggacagccttggggaaatatgattggacaaagagggtatgatctaatggtaataaacttgggggtacttagcaagacctctttgctcagattcttctctttgtccctgtgtcttcagaaaaatggatgtctctttcttctgggtataggagatatctctcgaatgagaattttatgaccttcttcaaagaaaggtcagaaaaaacatttatgtcctgcttaaggagggtgggaggaggtcagagagaccttcctgcttctgctgtttactcaaggtgccatattttgaggtagcatgtcctgaactccatcagttgaatgtttatatttgaagttagaacctcccccagtccatgctgctaagttcaccccctttccctatctcctcatgaccctagagaatttgaacaaaaaagggtccagtttcaaagacactgagcataagagaaagtgaagctggactgaaaccagggaatcaaataaaaatctactcccagtatattctcttcagaaaattattctctggagaaactgaatagttacaagggcacagtggcaattatgatgctttacaaaaataccatatatgttttgtacttttaggaaaatgaaaactgcacatttgaaataaaaaaagaagatgcagctgggtgtggtggctcacgcctgtaatcccagcactttgggaggccaaggcaggtggatcacctgaggtcaggagttcaagaccagcctggccaacatagtgaaaccctgtctctactaaaatacaaaaaattagccgggcgtggtggcgcacgcctgtagtcccagctactcgggaggctgaggcaggggaaatctcttgaactcgggaggcgaaggttgcagtgagccgagatcccgccactgcactccagcctgaacgacacagtgagactccgtctcaaaataaataaataaataaataaataaataaataaataaataaataaatttcatataaatgcagattcctggcttctcctagaaaaattaggctgcctggcccccctggagccatattccatctgacaatatggcttgcccatttagctgaagcacctgacctccagcttgtcatagtctctaccttgcctccttgcctccccacagctgaggctcaggtgttatttagtattgtgattattcagttatcttacttgtttcagggttgaggaaaaaaggaaataattttatgcctacatcaaaattgggacaatcaaagaggttccaagagggcttcatgcttcccctggcttactgtgctaaggtaccttccaggcttctatgggatttaagttttctacctaaaattcctgatgatatagtacaagctttcgttagctctgttatgagcacaaagaccatccttcatatggtcacctttttataagaagcttataaactttgtcaccctgcagctattccttctccagattactgtctccaaagacttcatttttcatttatgtgatcacacccatgtactcttgatctttgccacatttttcctgtctccacacagtcagggcctgatcaataaggaatgactatgtgttgatgacttcacagctctcacccattatccttcagttcatgcatatgggtgtcttgtctcctttttaaatagcgccattatcctaatggctaatgctcggtgggtggccttctgtaactcttgtatatttttctaccatggctgaacacagtgagtacatttccatcttgtgtttatgcacttgggttttcttttgtaagcacattgccttccacttatttccattaaatttcatattccttattcaaaaacacttctccaaattggtcaaagtaggttttaattttcccactgctgccaaaggtgctggttacctctcttcaaattgttgtagttatcacactttataatgatactgttttatcattcaaatcattggttcagaaatgaaattatatagagtctatggccgacctctgtagaacactggtaaggggtccaactcaagatgatcagtgatccattgaaaatggtggttgtcttctttaaaaaataaaaataaaaataaaaactttgagtaaaataaccccttaaaattaagtagttatttgcctgaattaagtataacctgtaacttattgttaagtaaacatggttaagctaacctttatatgaatacccaggctgtaaaaatttatgctatttggtagtcttggaaatacaaattccaaatagcctgaaataagaagctacaatataatgggaggccagtagttaaaaaatactgccacagtagaaggggtgaagtggatcaggaagaatcctaggatactttacttagaaccctttgtacaaacagcatgaaagtaatgagattaatgaaagatttttttgtcaaatttagaagaatctgagaaacaaactgcaagttttccatttcatttgatgtcttggcaaacctactgatatgtgtgttatttgtctctgtcttcttaatatttgctaccttgccggttgcctggtgatttaggaagacgtggggagtatttgtaaacaaaggaagcttttcagaagtgggtaacagtagccagagtttgctggttggatcttccaggaagcaggagctgagaaataggagtgcaaaagttttgttgaggggcatacctggggaagataaaaaagggaggaagcaggattaggcagagagccctcaatcacagggcaaatctgctgagtcttggccagctcaacaggagctcccgaccaaagatcccctgttctaggagctcaacactgggcagaaaacagccaggtcctattgcacccactgtgctcaatcatgaccgagagctgcctcagaagagtgtggactcaagtcagaagctgaggaggatcctaaaggcagtaagtaagtaatagctacaggctgtgagctctatttgcattcctcacagctgaatgccaagttctttcttgaaggaaaagtacaagcaatatatcttcatcacttgtgcttagaacattttccttattactgaacaacaattagagatgatcttgacattctcctctccgtattctcaatgtttcagcaacatgtgcaaaatccattcttctataccaaagtcacacactcacggaagagatgaagctctcaatacctgaagtaattcccaagtgttggtgaaggagtaagacaaaaacatgcaggattagaatgggcaggagagagagcagatgggttaggaaagagaatcactgaacattgaccctaactaaatatgaaaaggaaatggcaggtaggtgatcaaagaatcaggtgggcaagagttacctaaaatatcggtttcccattcactgcacaaaatgatggcatttgcccctttggaaatggttagctcttagaactctggaaataatagagtaggttgggaattttattcctccagaataatgtctggttttgaaaaacatgcatgctctttaattctcataatactgaatcttgcctttgaattctgtcatttaagtgataaactaaagcagttagataagggagatttttattgtacactggaatagatacaaaatagtggaaagtaaaggataataataataataaaagtcttagatggtgctacaaggtgacttgaattttgagaaatcaaatcaactcaaagaggaaaattcaggtaagataaaaaatatgtatggtgatagagtgtaatcttagcattgatattgtatatgtactggctcattacccactgcatcaaagatcataatgtgtttattatatcatttaccaaatgatagccatttcctgaacaactggcctctcctgcacatccttgtgtgatgtcctttattaataaatgatgcctgtactttggggcagaaagatagaaaaagatatctgaaaagggtctacaggaaataagagagaaattggtaatctccttagcttttctcttttgcactgttacattggctgattgtctggggcatgcaaaatgtatcataggtactacaactaaatcttcaaggtaaaacccagaaaaagtgagaaagagacccaaaccaccattttatatgtaatctcacttggtgtttgtttatcctgcctctccaagctctcctggcatgagataggtctgccatggtcagatagtaagtagcatccaatttgttgtttcttacttcatcaataatttttttcaaaataaactgtggaaagaaatccacttcctagcatgatgcaaacatcactacaacacagggtttcttaaactaaatttaaaaaataaaaaaggaagtagtggttattaattatttatttgcatttaagaacttcttccataagcattttccagagataaaaatcaaagatataattaaacttcagaatgaaagctgaggtttaattaatgagtaggtaacactcagttacctaacatcttcctagtaataaaatataatattaggaaggaaatatgttagccaaaaaaggaaggaaatgtatctttttctttttctcttttttttttttttttttttaaaaaaagaggaagcaaaaggaggagagtgatattgtgtttcagggcatttaatttgaatatatcacttgatagagtgcagacttccctgagttctataacctgtagtgtaaacacacaataaacaggcaccaaaacgcacccaagccaacaccaagcagccagtgggttttggctgacataaggcctctggtttgtggggttcatctggctccccttcagctctatcccaacatatgaatgtttctttagttagatcagtagtctttatatgcctctgttatatcagaaagacctgggtttctggagcagcttataaagattggggtttaggttaaaagcacatcacaggcaaacatgtgttgaacattattctgtgtgtggagactttgaagagcctctcaggtatatgtaggatttggtattatgaggagatgaattggattcaaggtactcaatcttattgccaatctttttcaataagaaaccatctccttggtttgcacatctgtgtttgataatgtgggagaatgtctttgattagactttcagagtaatcattcaaaggcaactttctcctctgctttgccgcatctcataaagttagattttgtacattagtgaggcactgattgcatgaaaataatattggctttatgagagagtataatcttgttcaaattataactctccccgccattctcaaagtactatttttgtgtcagattctcctccactgctgcttttatgagcactttccaaaatagtattttcttttttgtttcttctcctttattgtctttttataacttttaatcatatttttatggtaccttaatagccgaggcaaagtcacaggtggccttcactaaatcatttctacttttctataatcctaatggcagtgaaagaaaagaggtctctgggttgtcccccaaaatacttgtttatatcttccgatgctatttttaatatttctaaggatcaagatctctaccttgtgttaaagtatacatactacccattttgtttggtttcctagcatttgaaaaagtatattcttgacttttctcgtttttaattattattaatacttaatagttaattacttagttcaagttatgctaaaaactaattattttataactttttggcaattagtactcttactaaattttactaattgcatatcaaaacaatgataagagcaacttctaaaaaaatctgtcttcttggttcagtcttgctggttttctcttcaaattaagtgaaattctcttgatattttttcaaaaggtgaatattttctggaataaaatacagagttgaagtgaaatcatggaaactgctgtttgaacaatggtcattaaatgttattctctctgtcaccttgctgtctccccaccacatttatgatgtgaaactaaataaatacgggtacatctttgaaaccggtgtttttgataagaccactcctttgtggagttgtatcagggaatagtctcttaatcccagttggttgcatttttttcctttttatcagtctagatagattgagcctaggtcatctcttttgggcaaggatggtgagttttcagaaaactgaaaggttgccctcaagctaggtgctggagggattttgccaactgcacctggtgctgagtgagtggtagcataagcaatttgggctggagtgagaggcgaggaagaaagccacagccaagacttgggagatttcaggaaataagaatccagctgaccaaataagaaggcccatgggcagggagcagctgggcaccaggagatccaacacaggagccactgccttggaaattggaggcagttatttcatttccggtgatgttttctgattctctatatgattttaactctagaattgctaaaggtagctctgtgagtaaggtgggttgctagcctatcaccagattattaaagtaagtgtaatgtagggcagaaacaagaaaaaaaaaaaacgttggcttccagagaccagagactttgcttaaagaggtacgtgacagcttctgagggatctgtttgtatacataacatcccagtgtctttctgtcaagctacctgcctcccaggtacacgcgtattgctgaggaaacacaaccaacacccactgtttcaaagaaaaccattctttttggagtagtaagctcttttataaggctgaaatagatgtggagtattttaagatgaatagtcttacatccactaaattctacccagtttactctcattacaccacaagagccttggattttctatgtgtataaagacggtatttgtcattgagcttagtgctttttgtagggtcggcatattataggtttccctcataatgataacagaatcttacatcaagtgaacatggaggactgaatatttaaaccatgtgtgaaggagggaaaaaaaacatagtagagcttttcttttcactgtacagttatggattatctttgctggctggatatttatttcagatttttgtggtttctcatgtcgtggattacagggactcttgtaaatgggtttcatatggtaactagtgaccttgaaggactcaatttttaagataattaacttcacagttctaagtcagatctatgccagtcacagaatgaaataatttctgtttagttatctgggatttcattcggttgattaatacctataggagaagagactatttgctttgatttacatctatatcaccttcaatttaatatttcacgagaaatagaaggcacgaaataaccattttggagcagatacacaggcatcaaatgaagctcttttgatgtgaggtgttggagataaacaggtagtatcaggcgtccatagccttgcgttttactcacccctcatgctttgcacctaaagtgtgctcataactttgcagccatgagccatccccttgtcattttcagcccctgacttgttcctggggctgctgattcatctgttttcattgctgtcatgaaaaccagtctgcatttcatcataaaattcagaagtgccctattatattaggaaagaataaccccccaccagtggccacatcatatggagaaagaaccaatgtttcatctttctgtttttcagaagtctcccccaaaatgttttgagacaaaaatcagaatagaatctgcttaccctcaaagcaataggttttctctaaacaatctaataaggatttgtctagactaacatcctttgggaatttatctacagatgtctttaactcgttactgtgtccagcctgtgccaccacttgggagtaatgtgttccacaaattaactataaaggaaagaaatgaagaggaccagaaggaacaaatgcacaggaaacagtgcaaatatgctcctagacaagagcaacatttgttactgtttattactacttatccagaaagcctttcttaaacatatccccagacctgcactgggcaggctaccccttttctcccccttgatagtgcattagtaccgctccatggaacaaattgtcacagaatatcaaaatatgctatctacttagctaatccctatgttgcactcctgagcttagagactaggccttactcatcatagttccatcaacatgaagcacaatttctgaaatatactggtatactcagtaaattccttaaaaaatgacctctttgtatctcaaaaactctaggttattccttggtacatagaaggaacccaatacatgctttgtcaaagaagtaaagaaaataaaattattttagaattgttgagaatcttggtgatatgactgaaaccttttgtttcatggatgacaagactggggcctggagaagtgaggtcatttgcccaccatcctgcagctagaattaaaaccaaatgcagtggtttaaagctcagtattcttttcactccaaattggtagctgcctgtaatttgctggcattgtagaaacaaaaacatagtgaaaatcaccaaaattatattttacatttataaagtgctttacagtttccaaagcattttaataaacactatctgacctccctgtggtgttatctcaagaaggttaataggggagatagtattcctctttagtatatgaggaaacagggattcagagaagctaagtgacttgcccagagtttagaattcaaatccttctttcttttttcttttcttttccttttttttttttttttttttttttgagacagggtcttgctctgttgcccaggctggagtgcagtggcagtgacatgaacgtggctcactgcagcctcgacctcctgggctcaagtgattctcccacctcagcctcctgagtagctgggaccacaggcacatgccaccatgctcagctaatttttaaaaaatcttttaaaagttcccctggtggtctagtggttaggattcggcactctcaccgccactgcccccgttcagttaccggtcagggaaccaagaaatggagcaggacgagctgcagacaaaacccctcagacagcagattaaagaaggaagaggttttttgggtgcagcacaccaacatggcacatgtatacatatgtaacaagccggcacgttgtgcgcatataccctaaaacttaaagtataataaaaaaaatgaaaaaaagtaaaaaattaaaaaaaatctttttagagctggggtctcactacgttgcccagacttttctgaactcctggactcaagtgaccctcccacctcagcctcccaaaatgttgggattataaacatgtgccaccatgagcagccaaatcctcatttcttgatgaagattccttctctgataactatcttctgatgctgtgagagtgaactgatatttccaagaaaggtgtatcccagagattacaaacagtgaccatccaaaaaatattagaactgcgcagggatctttccagagcattctaaaaatgaagcttacaatagatttgattggctgtgaagttgaaatggggagggaggtaaaccttatgcaggttgttataggatgttaatctcctgggacagaatgggaataggtaaggtgacaactttaaaacaaatcagagaattaagaacatggttaagaaatgatagatttttgtgatcggggttaaaaagagaggagccatctttgatataaaataggactttgtttaacattcttgggaagatacttctcagaatggtgcatctcacccttcccattggccaagagcgtctcttgaatatggctgacttcctggacatgcaacctgtgtagttagaagggcccatagaagtgctcaccattggattaatactttgctgttgctgtcgtgaaaggctttatcatttttgaacagtcccaatgttttcatttttcaccggacctcatgcatgacgtaccagttctggtgaagcaaatgaggctttgccaaattttttctaattaagtgggactttttcctcctttgcaagtgattattccttcaggataaaaaagttttgaaccatgatgcatttgttttataaaatgaaaaccagagaagactgcaaaggtagtaacagaaatgaaaaaataagcaaaaatgataaggccaaaattattatttttcatatctttatgatcaaatatcttttctttatgataaataatcatgttttgagaattaggatttttgaaaggatcaattaaatggccttttctgactctcgcatgttgcttcaactgtgtaaggtgagtgattgatcttttcatattgatagaatggttgtgactgaacaatcatgagagcctgctgtgggtgaagatattggttttcttccaaataatttgcatattatattagtcaattttcatactgctataaaaaaactgcccaagactgggtaatttataaaggaaagaggtttaattggctcacagttcagcatggctggggaggcctcaggagacttacaatgatggcagaaagcgaagggcaagcaaggcatcttcttcacaaggtggcaggaaggagaagtgccaagggaagggggaagagccccttataaaaaccatcagatcccatgagaactcactcactgtcacaagaaaagcatggggaaactgcccccatgatccaattacctccacctggtctctcccttgattcatggggattacggggactataattccagatgagatttgggtggggacacaaaacctaaccatatcacatatttacccagaaatttcagagtcattgtgaggttggtaagtcagtgtgacactgagcaagccactggtgccccttcttgcctaatgtctaaaaattccttttcctactgttcttcttgctgtacatcgataaaggtttatcaaactttgtgttactcctcagttctatctagggatggtgtagccaagaagttgaagaaaattgaaaagctgtttgtatattcagtatttgcattttatatattttatagcatatagtaggataatagagaaaatgttaagattatttttatttttatttatttgtttacttatttgagacagagtcttgctctgtcacccaggctggagtgcagaggaatgatcataggtcacagttatctcaaactcttgagctcaggcaatcctccacctcagcctcccctgtaaaccctaaaagtgttgggattttaggtgtgagccactgcacctggctgagattattttttaaattgatttagatagtatccttcattgagaagctctgctgagcgtacatataaaagaatatcattctggccagccgtgatggctaacgcctataaacccagcactttgggaggccgagatgggcagattacttgaggccaggagttcaacaccagcctggccaatatggtgaaaccccgtctctactaaaaatacaaaaattagtcgggtgtggtagcaggcacctgtaatcccagctacttgggaggctaaggcaggagaaccgcttaaacccaggaagcaggggttgcagtgagctgagattgcgccattatactccagcctgggcatcacagcaagactctgtctcaaaaaaaaaaaaaaaatagaagacaaaaagaacatcattccagtaacaacaaacacaaggaaacttttggggaaaaagtttttcttcccctagattcaaactattatctattgtttctcatttgcataataattgtatgactgctttccacctctgctccactgtggtgttttctgttctagcttcttataatactgaatttggaccagcatatgtttatctgttcactcattcattaataaaacaaagtattgactacctgctattaataaatattaagcacagtgtgttgtgggaggagagaaggacattttttcctacttaatcataattagccttaaatagttccctaggagtttcgggtgtgtatgttcacactcctttggtgatgctgaagcattttgaggacatgactaggtcttacacacttcggattgggtgttgcacacagaataaagtccatgaaacttcctgagttgaattatatttggaagacaaaaataatttctgtctggcttagaaacattaagaacccaaagtctatgcgttagggaagagaaacagtcgacatgggtgcagaagtgtttgtaattaagtgggtgaacttgcttagatgaatgaaaccagattatttgagcagggccaatgatgccagagaaaaagaaaaataccaatggagagtaaaataagtacacaaaatgaaagattctgaagttttggaacgaaagttttagctcaggaaatggaagaatacttgagagtttcatgagaaaaaaaataagtgatagtgatagattgtaattatgcagacttctctgaagtcaaacagagaagggagagtatgagatctgtagtggttattagaagaatgattaagagaaagactatggcttaatgtttctcttttgccaaagatgttagaaagtactcaataacattaaagcagaagaaacagcaataaaataagaaggcatagatacagtgatgtcattgaaaaagcacacagtcattgaatctttggctttggagggatctccataaccatttgtcaacatccccacgcctggctgaaccacagaatcacctggtgaactgttgaaagagattctgacattcctcacctcatatggtgaatctttcaaagatgagaaggacgtaaatttcacataagctgttcttagccctttttggtcccttaaaattaccccattcttaatttttgtctcctgagtttccataaattatctatgtattcatccagcaacttgaaattcactattttgctgttttcagaactgtatacgtgctttcttgtccaatcaccgctactcttttaaaaattgagaccttagcctggatcttctgcatctcttatgtcttctaggattactcaaagatccccacagaagttctgcagtcacatctgtgagttccttcagtgaactctgataagattcatttgggcctagagacacaaactcataaagcggctagatgctcccttttagttttatcacctctctcaggcttcggttgcttcttaatctgttgttttgtggcttagtgtgaagatcattctcattgatagggaagatggcagcaaacagaatgcttgagtttttgttctctcttactgtcatctgctaatactataatatctgccccaaggggcgtgtgaatcattcttttccttcactctaaacatacgctaacaattccttttattgtcctctgcatttttctcaagcttgagcttattctcagatttaacccttcctgacactattcttacccagttctctcttgcattcgttttagacggtgtgctttcccacccccgtcttttgaataattcctgtttcatcagccacatgccattctttacattcctaccacctcggtggcattttaactcatctgtatagtttttagcatttatcattatcaaaattttattgttgaatgccttgcttcccccttaagacatctttcttgtcttagaccctggtcatggggccgtatcattctttcctctgaacttgtagaaatttgtgcccttccatttttgagaagtgttgtctgtggcgcagcttgctttaaattcgcaaacatttctggatcctccctagacctgtgaaatcagaatttttgaaggtagctcttgaaaatgtgataattagtaaatctataatgtttgggaattatgctgcccagcaatttcattccctgactcttacaaacaccaagcaattctctcaaggtttccatcgctttaactttgctttattggtccagagtaatagctcctctcattagtctcttcaactttcgaaagattaaattgtcagcaagttaataattcatctgttctgcttttaggacagtacaactttggaaaatcacttgaatttctctagatactactatatcttgtctccacaataataacatgaaatatataagggaaatcttatgcatgtactctggctggctaggttgccagtaatctgtttccattagagtcataccataagctttcctttttgtttcctcttttattttggactgagtgcaaagagttgggtgaacagtaatcctcagttcatggctctatcgtcatttgtctatacaaaactctttccctgtttgattttcccctttaatccttaatctatactccttttaccctctgcatgtagtgacttaagtgtttgggatatatccacaaataattagagttgttttgtgtagatatatgtaattcacagaaatggtattgtgctcaaaatatcattgttttcttttttccactcagcattgtttttaatatctctttcacacaattttgtatcctttaatcatattatatagtatgtatatggacatctgcttagcttctaagcaccctttaccgcacaatgacactaagaaacatcctcatacgtgccctgtaatggaactgaggaaatttctctggcttggaatcatgggagccatagaataaatgcattctgtccttactactgccagaaaagaataatagctaaaataggataaatgcattttttaaattttctttaatctttcccgcttgcatttcaaattcatagtattgatatctatttctatcaccaatgcacaagcattctcatttcccaaggtctccatcaatacttggtattgtctacatttctgatttttgtcatttgaatgcatatcaagttgtatttcattgtgtttttacatgaatttctctcattgctaatgagtttggacatcgttttatatggttgttaattcttatagcatctcattctgtaaattctttattgacatcatttgtcatttttgttggatttcttgttttttcttttgtttttttccttttcattatcaagttgcagtcttaatcagatttttcagtggtgtacctcataaagcagagatctttcattttatagtaatcaagtacatcatattattttcattagaggtggttatactttgggcttttaggatcttaagaaatctttttccgcctctatgtcacaaaaaatactttcctacatttccttctactgagctgatagacttacctttcacattttggtctttaatccactcacatcccactctggtttattgtgtaatagaagggtatagaaagccagctttattttttcttaatacagtgaggaaatttttccaacaccaatcacaaaacatattcattcccctgaggagtgcagtgccctggggttggggcataccgtgtcatggccaggtgcatgggctctggggctgaactgcccaggtctgaatcccaggtctgtgacacactagctttgtggcagctgctaactactgcttagcagtgctccaagtctcagtgggctgtttggaggaggaaatgagatgtcccagacacacggaaagcactgtttttgttatttatcaagttcttctgcatatatgaatctattgcagttcttcttttctccactcagtctcattggtgtctttatttttttttcttgtgtcagtatccatgatagttctccctttctaatatgtctaatatgccttcctcattcctttccctcccttcttcactgccccaacccaggatcacatgctccgttttgcagattgacaaagttgactttgtccatgtttgttgagttgaacgtaatttggaggaatggtataaggataagaaaaaaaaacttggaggagactaatgcgtaaagcaaatgggcgtgcaacttattaatttacagtgagacagataactgccaaacagactcaggtacttggtttttgtatctgcacattcatctctgcaggacagtatatttggaaagccatttattttagggtcaggagctcatggaatcggagaagatggtagatggaaaatctaatgtcattatgccatacctctggaatcaccccatagtagacataaatttaccttccaaacaaggcaaaagctgtactgtcacccagatctccctactcttctggacagtgctgagtacacactgacgaattcttcttgcctaatcctctctctaaccccacccttttatagctctgagcagaatacctcatttctaacacattctctattcagatttgtcaacaccattgcctaagcctaaaccatcttcctacattctagccacaccttgattcaatttctagacccagggttttatcctgccccttaaggtaacgtctttaggtaactaatctcattcagtgtcagtaggttttactcacttaactaagaggacaacaatttttccgagtttaggaagcaatttccattttgcttttctccgtgcataccacttggccacataggatcagttttacacttttatctggctacgttttactctcctctttaaagtcctctctggccaacaagctcctcccaaacacatttttttttctggttccttttatttgcctctaccccactcatcttctccacccccaggcgtggagccaatcttcttatatcttaaattagtccctatttttttggctccttcagtgtctcagagttggaaagacaaagaattgtaatctttagagtaatattttttttagattcaaacagctagacctttttctgaacctattcaaacccatttgctgtaggtaactgtctaacctatagccctgggcttgtttgcagcatcaaaattcattcccaaagattcttgctaaaagaagctggtgacaatgaaaagtagtcactgctgactcagatgttttatatcaattgtttttctgacttgacatacaaaattgagtcacagcattaaatataggtattattatacaattaatgtcagagcaaaataatagcctgctttattttgattttcatgtttccattgtacttacagctatttatttctgttgttcaatcatagcttactttgacttcatgttcaataggttctgcaacaaatttgtagttaaataacattatgtgtctcatctcaatcagtcacactgctgttagttcaggtaaacagacaataatgaagtaggcagggcaaagaatgtgtgttctgttccttggagagcatcttgagaggcataaatgaaaatgcccccagctcccttttgttatttttctataccaactgaatttggaaatgtgtaatctcctaggtagtctaacagacataacaagggcctataatcttaatcacatcagtaccttccacttatatacttgctttccacttgtcaaagcagtcaccttcattagcttgtactactagtttatgtgacataaattctgcgagattggtaagaatgaattattattgcattttggcaatgagaaaatgaagggcagaggcagattaatggcctgcctaaagttacagggtgctgaaattagaagccggcttgcctgacttctgctcttccactgtacctctacattatattcttggtgatggagctcttctctcagaaaatgctataattcccaaggaccacatttatgacagcgttagaaaggtctagaacaaccttccgtgtagatccatgtgggagaagtagtcttccaccaagtgctgcgactgggggagtcagggaggctctctgccccttgccaaagctgtgggacttcaggttcccacaggcccctctccccttgcagcagggcactggagggcggtattaaaatgctgtgttctcttcgaaatcaagcacaggaagccatcagcaacagctaaaacataactctcattatgctgtagccctgatggggccccagagactaagaaccagggaaaatcaaacagaagtcagagtatcacaaaacttccagaattgagaactgtccccagaagagcaaccacagtgggatgcctggataggaagccaaaggccataggagggtaagcagtggagaggagaggggccttacccgccaaatccataggttttccaagactgttccctttatgcactaggatctaccaaataaagagagtaagataaaggtcaacaaattgactaagacatacgaagcatttagtatagtgcccagcacagagtaaatcctcaataaatgtgagttataaatatctgcttgcaagtaagaaagcaaggcaaaggggtataattgaataagaccagacatagaaattagaactcacccttgggaaaacacacagagaaaaaccgaggagtaacacatgcctctttcttttctggagcctctgtttttgttttgttttgttttcttttctttttgagatggagtctcactctgttgcccaggctggaatgcagtggcacaatctcagctcactgcaacctccgcctcccgggttcaagcaattcttctgcctcagccttctaagtagctgggactacaggcatgcgccacaacgcctgactgacttttttttttttttttttttttttttttttcgccatgttggccaggctggtcttgaactcctgacctcaagtgatccacccgcctcggcctcccaaagtgctaagattacaggcatgaaccaccgcacccagtctctggagcctcttttcctcccatctcccatgtgtagtgaacacagcgaaggcaccctgagaagccaggtggtcagaggattgacccagcgactgcatctgtcagttctaaaatgaagttgaaataaggaattcctagagatccctaagtaatcaaccatgccagagtaacaggataaagaagcatattttgcatttgtctattgactttattccaagcgtaaaaacacttagacgtgttcaaagctaaataaacttggaacagagcttcaagactctgaagtcccatagcttagtgacttcctatatgcacttcctagagaaccactcattttcggattctcctcctcttttttgttagtcttgacgtagataagagaaatggcattccctagtgtactgtttcctttgtcccctattactcaagcctagaaattacatctgagtcctccttgttacaggtgacaaacagcatttgttttgcattttgatgcagccacattctcaggttccagcctgccaagcaaggttggcctgggctggtaatctcccaggctttaatcctctccatcttttatttgtgtggaagctcaaggcattagtcctcttaaaaatctctaagattcattttgttcacaactcttgaatatcgtattacaaggcagggtgtgatttttattgacaattggagtatgcttaaatgaagtgtgtggatgcctcaagaggggccacaaattcccacaacacttaacatgggttctggtaacaaagacacttaacagctaggtaagaatgtcaagtggctgtgactacaataatggaggcctacaattagtttaattacaatacctactcacatgtaataatttctcaagaagcatggaaggttgctcactccactggtagtttttaagtcttttttaccccaaggcctctcttagaaaatctgctgtacagccgggtgtggtggctcacgcctgtaatcccagcactttgagaggccaaggcgagtagatcacgaggtcaggagttcaagaccagcctgggcaagatggtgaaaccccgtctctactaaaaatacaaaaattagccaggcatggtggcaggcgcctgtaatcccagctacttgggaggctaaggcaggagaattgtttgaacctaagaggcggaggttgcagtgagctgagatagtgccattgtactccagcctgggagacaagagtaaaactccgtgtcaaaaaaaaaaaaaaaaattagctgggcatggtatggtggcaggcgcctgtaatcctagctacttgggaggatgaagcagagaattgcttgaacccaggaggcagacatttcagtgagccaagattgcccaagatcgcaccactgccctccagcctgggcaacagagcgagactccgtctcagaaaaaaaaaaagaaagaaaagaaaatctgctgtagcctggcaggtcatgatgttctttctgccacaaaacacacagcatcgaatccgtttacagacacaggcctgctgtcttccctttctctctgccctccaagtgtcacatcagggccatatccacccaaccttccttttttttttttttttctaatctacaggaaagggaaaacaccactgagattatttacaaagaaaaacccttatcttaataatagtttgcttccattaaatgtatcttctttggggacttaatctttgtgcccaggcatgttggagacaacagctggcatttatctttatggaaggaaaggcattccaagcatagcgtgttgggactcaagtcatttcttactttccttttattattcacactgatgaatttaagataggcttcagatgaataaattaataaactctgttgaagaaaaatgacaactgcctatatcgccacacatgtgaatcacagggtgccaattcagtagtgttggaaataggatctttccaattattttggagaagggtataggttacatgaccacataaagcagtcagctcttataccctgttgaagataatcagtgacaaaatcagccaaagcaaaagattatccatttatcctatctatctacccacccacccatctatccccccactcatccatccatccgtttatccatccattcatccatccatccattatccatatttatgttggctagagctctgtgggttactttaaaccaatttttttctttcctaattcaacttaggaaacattaaaattagctttacattccataagcacccatacactgatggaaagtggagacagcccatagcgctttgtttgaaggagttagaattttaaatttttcctgaataacctcaatagactaataatcaagtgttgactcagctctcaaatttgctgtgcagtgcttacatggacagaggtaaagaatttcctacttatattcgatgacaacctaatgttttgttctctcagtggttattacagcagcttatatttatgaagtgtctttttctgacgagtttaaaagattctgtaattcactgcattttacatgtggggacccagaggaatagaaatgtcacatcgtgactgagggacagagctaatgccagaacacagctctcttaacttgcagggtattgctttatcttatcatgctacctgtcagcatacagatgacactcaaatctgtctcctctcaagcctaaattcacacttttttttttctttaactgtgactgaacctcagtggacagagcagccaagatatcaggcactcaggcaccaagcatttgaattctgcaacctttgaagttgtatctctgcacctgggggcattttaggtggcctccaggccatgtgccttcccactaataactggtgatgctgtaccgccacaggtgtcagcagcaataactgggcctagcttttagttgctgccacagatgtcctaagggagcggaagctgaatcatcacacttaggtctgggaagctgtaaaaacaaaacctgtgctgaacagcccccaatatctttgtctaccaaggagtctgaactcttttaaagtttcttcttggtaaaagcagtggcttctagaaagacgacctccactctaaaatttctactgataccttcaaatagtgccttgcatcttcaagaatgattggagctgtgttaaaacttgtaaaatttgaagacatttcaaaagaatgcagtgaggacgattaaatgatttgtaaattaatcatttaggacatacaatctccaaaattgaagatgccagccttatttcgtccagagaagagaaagctaagaagaaatacaataatccattgttagtgttgtttatatgaagagtcatgctatgaagggtggtgatcagatggtctccatcctcctcttaagtgagggaaagggagtggaaggaaataggtttaaactaaagcatgcaggatttaagttagataaaagaaagaatttcctgacagtaagattcttaaactccggaatggttatcaaaagaagttttggaatctgcttatctagagaccttaaaaaacactagggactcccatctgtctaaaatggtttagaacagacagccctaaaaggttctcagaggatcggattatcttttaagattctttctagccatatgataaacaagaagattgggagtattagtaaatggccaatcagtaaacatctcagaggccaaaaccaccttggcctccagataactaatctcataatcaccagtgtaagtgggcttgttccaagatttgccaagaagattcttaagaaacccagagtttctcccagtttgttgtcctgctatttatttttgtgggatgccttttctgtgtttgagtttatgtggttaagtttctgtgtttgagtttatgtggttaagtctactgatcctttccccttttactccttttattcttttaatacccaaaccttaacaattccattgttttagttttatgtgatgatttgtaagtaaataaggatggtcactcactgtggtatttatttacgttagcaaaaatggggaagcaacctaaatgttcaacactctgggatttgccacagtaagggtgatacgtctgtgtgatgaaatgcagcagagctattaaaattcaaaagtttgaagaacatttaattacctgaagaaatactttaaatgggggacaaaatagcatacaatactatatccatggcatgattccagtggtggatctttaagaaaataaaggatataccaatactggtgggaaatatggtgttagaatgacaaaggattttgtatttccacttgaaacttttttgagtctcagttgtttgtagtatatatgaatatctgatattatcagatttaaaaagttgtaaaataggccgggtttggtggctcacacctctcatcccagcactttgggaggccgaggcaggtggatcacttgaggccaggagtttaagaccagcctggccaagatggtgaaacctcatctctactaaaaatacaaaattagccgtgcgtgatggtgcacacctgtaatcccagctacttgggaggctgaggcatgagaattgcttgaacccaggaggcagcgtttgcagtgagctgagatcgggccactgcactccagcctgggcaacagagcaagattccgtctcaaaaataaaagttgtaaaataaaaaattcaaataaaagaatagacaatcccctattggcaggtacaaaactaacgttatcattgtgatcttacttttaattacctctctaatatttctaaagtatttgtggaacatgagactggtaggcatgtcgtgtcctcaggcactgtgtctaccttgtaacacaaattatctacctgttctcaattcaggggagcttgggaaaacaaaaaaaaaaaaaacaccccataacgttgaagagctctcgtaactcttctctatgacttgtcttcctcctgactcagggaatgaatcaaaagttagtgtgcttcataacctgtacttcagttctttttcctggcaaaacactctaaaatgtaagttcctgtgttgttaagtttgatgggaccctgttgcatatttcaagtatagatacagctttacctactgaacacttgccctcttttctgtggctgcaagagaaattgggtgccttaaaggcagtattaaaagaatgtgcaactatctactctcaagattgtgtgaaatacattagtaatagtgtgcacagcctatgttgaaatttatcatggacaaattgtgagtgaggattttactcaacactcagttttaccattaccaaacctgctctccagcgtctagtcaccacccttattctcctaattcagacatttattttctctccctagtgtcatgggctcctaactggtctacctccacccagcatctttctcccgtgtcccattttccagtgagagccagcatgatctgtctcacaggctggcacacagctcacctccacacgtagaatgagatggaaattctttaaacagcctacgggcgccttcgtgttctgattcctgtctacatgacccaccacatcttcaacttgttctccacttgtaaattctgcttcttcagtctggaactatcctgtaaaaatagagttaaagaaaaatttcttcccatttttcaagacccaggtcaagtcctctaactctatcctgtggaggcttcttcagcttaccacctcaatgctttaacctccctacattacagataatcacagtgtaattacttgtttgtatgactttttccaagtgggacaaggagctgtttaagggcttaacttttacattcttacttcctgtacaaagcatgcagtgcatcagctgagaagtagaatgtttttgttgactagatatgttaacttattaataaaatagagattatatgcttttaaaataaacaagcaataattgagctctagtcattagctagcagcaagtcagaccatggacctaacttctcttggctcatggctcctcctagagactttgtccccagagcccctccctgctggactgctcccaagaacatcttttcctcacttccccaaggacgtgccttcagagtgacctagagacccttgcaaacaagttaggggtccagagggagaaaaaggcaggagtcacttagtcattttccactttgctttctagttgtcttaatgatgtagtgaaaatagtaatatgttgttttccagaagaacaactcccaaactagtcaatttttttaagtggaggtcatgataaggcaaccaagttttttatttcaccaagtaaaaacataaatgaaacccctcatctactagaaccattgtttcataaacaaaagcatatttaagtattaacagaataggaaggttgtaattgcagaaagtaggagaatcatttcaattaaacaaatgcagtgagatttttatgaagtgaagttgtacctgtttttcccacagcatggcacccatatcctggaccagttcaggataatatgcaatgtgtacctctcgaggaaggcagggatggcctgccaacagcaggcccgggaaagggcaggagtatctcccggctgctcataactgaccttatggatctaccaattgccaggaggaagacacagttcattctgtcctcttcctgatgtttctactgctaagaattgctcttggatgcagtagaggggaacctatatcttgaaagctgaatccgagctgttatttaagaatttctgaaagtatcgacagatgacagtagcacttttaacttggagaagaagagcactttaagtgcattctgtcatcttggttacttactgaaatctgttcatggtagagtgggtggtagggtgatgtttgccttggcttgacagctgtcaactgtctgtgtgtggtttgtcatttgttgcttttggcttgtgggtggtctgcagtccatatttcttgtgtatgtcatttcattcacaagtaactccaggggggcagctgtgggcaccttgctattgctgaagtgcgagcctccaccttctgtgacattgcttggcttctgttggtaccatctcccaccaatatcaaatgcttgacatccttagtcatggaccaatgtttgggtgatttttattttcataattgaaaatcatcttggaaaagtggggatctttcccatcactctattagctaagttttgttgtttcgagagagaaatgaatattcacttttaatgtctctaacatggagtcatttaaaaaataccagtgaagttacagattgctcagccttcagcctgacattgagaatcttaacacatctgtataggaaagttgtataaataaccacacacaatgaaacttgttctgtatggggcctactttctctggtggtggaattattaaatgtggcaggtagacacattcttctaagttttgaactatggtctgtagaacaaagcagcttgtgactgtgatattgtcctgaatgtttgtgtttattgactggccactgtgctgacatggaactaggaagtgggcatcagaggctgtagagttttctgatttgtgtacctatctatatattccaggattatcctccagagaaaataacctatagttagagcatcagtatttggagtttcttccttagaagatcctggagatgatatcatcatctcaaaagcttaaacttcactgtaacccagtcatttgatttggggaagagagggtttttattaagatataattcacatgccataaaattcaaccgtttgaagtgtagaatccagtggtttttaatatattcacagagttgtacaatcattataatcaacttcaggatattttatcaccctaaacaaccactaatctactttctgtcgctctacatttgtctattctatatatttaatataaatagaattatgtaccatggggtctttgcgactggcttctttcacttagcatagtgttgtcaaggttcatccatgttgtaacatgtatcagtacgtgtatccctttttattgcctaataatattctattgtgtgcataaataccacattttatttatccattcatcagttgatggacatttgggtggtttccaccttttgtctattgtaaataataatgctatgaatattcgtgtacaaattttgcatgaatatatgctttcattttcatagatatatatttaagagtggaatttctgggtatatggtgactctatgtttaactttctgaagaactgcaagaccatttgccaaagtgactgcatgtttttaccatcccaccagcagggtatgaaggctctaatttatctacatcctcacaaacatgtgttcttatctatccttgttattatagcaatcttagtagttttgaagtggttttgagtggtgtctcattgtggctttgatttgcatttctctggtgactgtgactaatgactttgaattttttctcttgtgctcattgaaaatttgtatatttcctttgaagaaatgtctatcagtttccagtcatttaactttaggacctgttttcaaatatgaataaatctaaaaggtaaataattggaaatgagaaatgtagagaaaaatgaggaaaaaatttggtttatataaagtttccttccttttctaatattcttatctactaaatgactctgaatatttatttcttatccacactgcataaaattaaaaacatttttaaaaggccaggtttggtggctcacacttgtaatattagcacttttggaggccaaggcagaaaattacttgactccagtagttcgagagcagcctgggaaacatagtgagacttcatttctacaaaaggtccaaaaatcagccagcatagtgccatgagcctgtaagcccagctactcgggaggctgaggtgggaggatcacttgaatctaggaggtcaaggttgcagtgagctttcattgcaccactgcactccagcctgggctacagagcaagaccctgtctaactaaatgaatgatgaattatttttttaaatcattatttcctctgcttcaaaaactaaacttttagtattaaaaatgtagaggcttgcttttatttcattctgaatgaaatcctttgtcagagggacccagttgccatgtgctattcagggaaagatggtcagttctagtgctgagatatagtctaagatgcaggacctggatgtttttctcagattctttgattctccagggggaatcagaagatgaaaatcaaaccttagccctgtacatttcagaagcaaggaaaggactagtgagaacaccagctctctccactgctctgatcctaggtgtagtcactccatacctgttaactgagtaacagaaggatgcctcctaaaactgcgaaccattttatagagaagatatgtctattagaatttttcaccacagcaatggattatgggtttttttctgtgtttctattcatgcctcttccatgcattagatgagaagcaaaggcagaactattagacttcaaataaatttggcataatggttcaaaccattccaagtgaaaaggaaaaaatcaagatgaatcaaccaattaaagccatagttgaagtttattagtaaaatgtaaaggtatatcaaaaatgaatagagaggaaaatcttaattcaatgacaatatttcttatcctcagttatgcttgatactttcatgctacaagaaaagttaatatctagtccttaaatacgttgttgatttttcttgatccgcaactgtgatcttgtttaaacccacttagtatccagtaaaggttgccttcattccatgtgaccacagggatggcttaccccttgctctgtttatgtagaattatgtaatgagattatcatttctgcatgctagaaagatgtagtgtttaaccatttcagatcctcctagcattaaattcatcactgatgtctattttcggtaatctcttttcttattctgtcttctataaactttccatatttacttagcttgcccagtggagagcacacaataactgtcagtagcgatcatgagagtcttgaggattggggaaaagtgcaatgagaaagccaggaggctgaaatagaggtttgaaagcaaaagagaaagagggaaatgtctaagcttttctttttcctatttaaaattaaccacattacaggaaattgaggaaaaatgaaaaaaaaaaaaagatgctctcttcttcataatcccatacaaaacaaccactttattattattattatttttttgagatggaatctttctcggtagcccaggctggaatacagtggagcaatctcagctcactgcaacctctgtctcttgggtcccggttcaagcaattctcctgcctcctgagtagctgggattacaggcacaggccaccatgcccagctaatctttgtatttttagtagaaacggtttcgccatgttggccaggctggtcttgaacccctgacctcatgatccgcctgcctcagcctcccaaagtgctgggattacaggcatgagccactgcgtccggcccaaccactttaatttttatatatttctttcagtcttttattctatatattttgcctggctttatataaatcttgtttcctggttttatttaatatgatattatagctaattttttaccccgttacagtcttccacaaatccataatttttcactgctgcataatactccatcaggtggagacaacaaaatttaattagtagtctttagtatgacagagtttgaaagaactctgcttggaaataaaaaagatagattaagagtgtaaccataaaatgaaacaagccaagaaaattaagagagaaaaatttttgagcagaattccttccagtttttcaaaggttagacatgccaccatgcatgagcacaaagcacaatgaagactgagcatatatgattaagaggttagtttcataatcaaataatttaaattattatgatacatttaatgatatgtaaaattttaatagcactttatggtaattagacataaataataaattttaacataggtaaccccataatgtaattagggatgattttacataccaaacaggattctcaaagttcctctttgttctccagtactgttcttataatcgttgtcaatgtcaagtattaccctgacacttgtctcatccaatgatactggaagatatccccccaaaatgaaactttttgtatttatggataaaaattatttaacgtgcataaagtactgtgaaatacaatgtaaagaacactgagataatttggatatattcctgatttcaggtagccatagagatgaatacttcatttattcattcgctcattcattccttaagagaataataggaactaaggctaaagaagtgagtgaggggaagggtcaggaagagccctctgggtcagtgtaaatgatctgaacttgatttcagaggcaatagggagccgacagagacctttcagcaaggtttaaacacacacacatttatacatttttttagaaatgaacatgggagaagtgtggaaaagggactagagtaggagagatttgtggcaagacattgagtcagtaggagacttttggaaaatcccagagaacacaagggcctgctcaaaggcactggcagcaggatggaattgagagagagagagaacgcacatgtttgtaatttaagagattgtctctctactggaacaagctagaagggaggaggaagaggcttaaagaaaaaggtaagttatgcttttacttgaatttgagaagcctctggacagactagaggagaggtcttatttttaggtagtagactgaaacagagaaggggagaaacaagcccttttaaatgttaagaaggaagaggcagaaatgaaagcacacttgtcctgccagcagtacatttcaagaagtatagaatgctagacagtgctcagctacaacaaattgacaagaataggatccaaaaatggacacaggggtcatctgtgaccttagcaagaaaagtttaagaaagttcattgagttaaaacccagacattaataacaagtgtttactgactgttttctatgggcgggcactgttccaaggactttaccgtagattatcccatttaactttccataatcctgtgatatgttttctatcattatctccacctcacagatgaaaaaacaggtttggaggactgagaaacacgaggccaccagatagataataagaaacagctggggatcaaagcaggcagagtccacaagccaagcagggcctcaccacactaagtaatgggtcggaggatacttaggagttgaggaaacagtgaaaacaagtgtcgacatcccttctaagattccatgggttggacgacagaggctgggagagcagctggcccattacccacccctaggaagaatggcagatccttgagcagcgatgatgtctgaggatgggagaagcccaagcaaacaaacagtaaagtgatctaatgacgtgaggtattgggagaagttggggagggatgaagctttagtctgctggtttctgtcaagaaatctaggggtaatggtggggactttaagcaaaatcatggctgatgtgttcaagtactgcatgcaactgagagtggggtgctgtaggacatgcagtttgatagcagcataaaatccggaatcactgccatgggagatgtaaacgaaagctgtggaggaataagtaaaatcattactgagcagtcctgaggcaagagaaaataaattggaggttgtatgtaggtggctacagcattatgggtgaggtggagggtctgggggaacagctgtaaattgatgggtgtcctgaaggaaagaaagtacatgggtagatggcttcagtgagaatggagaggagtttgttgccgtgttttgttttttaaaaagactggaaaaacacgttctttaagtagtaaaatggaggcaggaaatgctgttacggcctccaagcccagagatgatataatagctaatgttaactgagcaccaaagtatgtattggaactgttctacacactttataacaagtctgtgaaatcagaaccttattagagttagctgggagaatgcacagctcctgtgtgtaaggaccaccagcaaagccaagtttcagttaccataaaaagttggaggaaaggatttagtgaaaggaaatgcaaccttagttagaaggaagagagtgggtagatgttttccctctaacaggaaaacatcagtgtttctcgtcttcacctgaacaaggtttcacctggagttcatggtaaaatacagattctgactcagagttctgattctggaaattctgattcaaagtttgagtgggccttgaactcatttttgaaataagctcctcatgatcatagaagtttgggaaacaccagtaaggggtttaaccaccagtgttagaaactgggtcagcagaagagaatgccagaaatgagggatgagagggagggaagagggaaagaaccagcacccagatgagcctaaaaggatgggagggagatccccagccctatactcaaagataagaggctccaagtctctgatctggtagaagcccacaagggactggagaccagtcctcacaccctaccaactccagtagccaagtggagtctcctggctcacatctttaacaaatgacatgagagcacacagaacatcaggtccctctaatcagttttgatatcgagaccaagtatcacatggtgtaatccaattttttttttttttttttttttttgagacagggtttcgctcttgttccccaggctggagtgcaatggtgaggtcttggctcactgcaacctccgtcttctgggttcaagtgattctcctgcctcagcctcccaagtagctgggactgcagccacgtgccaccacgcccagcttatgtttgtatttttagtagagacgtggtttcaccatgttagccaggctagtcttgaactcctgacctcaggtgatccatctgccttggcctcccaaagtgctgggattacaggcgtgagtcaccatgcccagctggtgtaatccacttttagggttaaaatatgtccttttctgaatcaccacctcaccccacaaaagcaacttatgcctgctaccagacacctaaaatcctttgcagggggaccaagggtccaccaccctctcacagttataacagacttaaaatgcaaaagccaggaagagaggatgcattgaaattccttcacagtacagtgaatccatcaatcaaccagtgtaaactactgatctcagtgccctgaacaggcaggttgaacaaagggattcgaggccattggaggcctgggtactggatacctgttgtcagccacctccctaagggaaacagaggtggaagggaaaaaagaagaaagtttcaagtaagtgtcatttttctttgttttacctcagaaggcccaaggctggcctgtttacattcagaatagaaaagccaacatgagagctgcgtactgaggtattcttactctgccagagcttacccaggcacagcttctcaggagtgcagcttcaccatgctcccagggctggaagttagcagaaaagagacatgatttttttttctttttttttttttttgagacagagtttcactcagtcgtcaggctggagtgcaatggcacgatctcagctcactgcaacctccgcctcccaggttcaagtgattctcctgcctcagcctcctgagtatttgggactacaggcgtgcaccaccacacccagctaatttttgtatttttagtagagacggggtttcactatgttggccaggatggtctcaatctcttgaccttgtgatctgcccgcctcggcctcgcaaagtgctgggattacaggtgtgagccaccatgcctggccttttttttttctttcttttttaaggagaaaagaaccgtctgtggctacttctaaagcagctgctgataggctctgattaagagttatcagtaggttccttcaaagtcttgaatcaggaagccacgaaaaaaactctgagaaaaaatatagaggggagtttgagagggctaaatactgattctcacagactttgattgaaaaattgtactgaatttgaaacacatgagcaatggttgttctcaaaggctccataattcagctacttcactacaaattcactgaactgcctctggttttgcttcaaatccctgccaccaccaaaaatgttagaggcaatcaaataccgggttataattcatggagattaatattgacaggcagacaggtccctcctctctgagtttcatgggattggcctccagtgaacctggacacttgacaactgttaggtgaaatctacatgtgcatgctgaatctttagggacgaatccagaatgtacccatgttccatgattatgatgaagtctaatattattatatttggggttttttttaaaaaaaaagcaaacatagactctgattttgaccagtatattggcaaagagaagatatgagctattattttacattgttattttaaaatataatttcataaatgacttctgtattacccacactctttagcaaaattcactaattagcaaaattggctaattctctgcttactatgtaccatcctagtaattggcaaacaaaaaaagtggcagcatcttatatctctgcattaatacaaattagcaggtattacagtgagagctcttattacttgaatacttgttcttaaaaatatatgtgtggggccaggtgcagtggctcacacttataatcccagcactttgtgaggccaaagcgggtggatcacaagttcaggagactgagaccatcttggctaatatggtgaaaccccgtgtctactaaaaatataaaaattatccaggcacagtggcacgcacctgtagtcccagctactcaggaggcagaggcaagagaattgcttgaacccagaagatggaggttgcagtgagccgagatcatgccactgcactccagcctgggcgacagaatgagactctgcctcaaaaaaaaaaaaaaatatgtatatatatgttaaaaatatatattatacataatatattatatatattatataaagaatatatattatataaagaatatatattatataatatgtaaagaatatatattatataatatgtaaagaatatatattatatattatgtaaagaatatatattatatataatatataaagaatatatattatataatatataaagaatatatattatatattatataaagaatatatattatatataatatataaagaatatataatatataatatataaagaatatatattatatataatatataaagaatatatattatatataatatataaagaatatatattatatattatataaagaatacatatatataatatataaagaatatatattatatataatatataaagaatatatattatatataatatataaagaatatatattatatataatatataaagaatatatattatatataatatataaagaatatatattatatataatatataaagaatatatattatatatattatataaagaatattatatattatataaagaatatatattatatataatatataaagaataaacatatatactatatataaagaatatacattatatatactatatataaagaatatacattatatatactatatataaagaatatatataatatataaagaatatacattatatataatatataaagaatatattatatattatataaagaatacattataatataaagaatacattatatataatataaagaatacattataatatataaagaatatatataatatataaagaatatatataatatataaagaatatatataatatataatgtatataatatctaaagaatatattatatataatatctaaagaatatatataatataaagaatatatatgatatattatatataaagaatatatattatatataaagaatatatattatatatattatatataaagaatatataatatataaagaatatatattatatatattatatataaagaatatataatatatataatatatataaagaatatataatatatataaagaatatatattatatataatatataaagaatatatattatatataatatatataaaaagaatatatgttatatatataatatatatgtggacatttatttgcccatggtatatagtacacacaaaattcacaattttttgtcacaatgacaactgctgctcatatttgcatttcttcaatgcttgctaatcaaaatcaagtgttccataatagatctgctaattacatatgtcgttaagtagtaacttcctcaaaaggctgtgttcaaagtagataatgccaagctttggaaggtcggaaggtactgtatatttatggtttgcatatctactaatttgtctcctctagttttacccatttctgctcgtcatctttaccacttgtttgtactgttttagagtaatccttccagctagcgttaatgccagtcttcccatctccattgcttatgctctagcttcatgtccgtttcctttgaatctagtgatttcccaaccaataaaagcgaacggagagtggtatgtattggtagacaattaaattaataaacctatatctgaaaagctcagaaacatgtagacaatgtatatatttctgtttgggggaggactgcagttaatgagtaggaaaggggaattagtacaaggtctaacaagaaactagagggatgcatcaagcagaacagaaataactatgcatttccttctttaacctttcctaatcatttctctccttttccttcttgttgtttaaaactttttcagttttagactaccagaaatttgcaaagaagtagcacagttttcatatactttttacccaataattacccccaatgttaaaatagtgcgtaacgatggtacagaggaccaaaactaagaaattaacatggttacaaaactattaactaacctacaaaacttatttgaatttcaccagtttttccattaatgtcctttttctgtttcagtatctaatccaggatacaacattgcattatttgttgtaactccttggtcccctgtgctagctatgtgacagttcttccctttttccttatctttcatgaccttgttactttggaatgtagtagtgagttattttgtaaaatgtcactcaatttgggtttttcttaccatgattagattgaggttatgcatttttggcttgaatactgctgaagtgatatactcttcttaggaagtacatgatgttgatgtatcttataactagtgatgttcatcttgatcatttcattaagccatgtccgctgggtttcttcactatgaagttacgatttttccctttgtaattaatacatatcttggggaagatattttgaaactatgcaaatatcctgtttcttttcatgttttcacccacaacttttaccatccattagtggttcttgtcagtagcaatagttaccatggtgtttcaatggtgatttcctgttgcactaattccttctacattcattaattggaattcttatctaaggaagaactatactttctcccaccactaatgtctctattcgcttagttatgtcattatgagattcatggatatttattttattctaagggttataatctaggcctatcatttattttgttgctcagattattcagtattggccactgggagcattttcaggatagctcatgttccattttaacttgtccataccttttgaagaagtttcttattttttggcaccgtgaaatgctgtaagtttacctcataggttccccgccacagcccaggaatgaaccacttctccgaggaagtctggctcctttattgtagaaaccaagatctgagctctaggaatactcattgcttgagtatcattgtttctagactctctcaggaaacagaacctggaaagtttacatagatagatagatagatagatagatagatagatagatagatagatagatagatagatcgatctaaactatgtctacacatatctatatttacttccaaatctatctgtatgcacattaaaaaaccatgagtttatactgatacctccaattctaatccaataccacagtaatcattctagcctcttcctctttcattatttgtaacttctttctcatgcagtaagaaagctgtctctgactatctgcaatataattatttgttcaaccctcatatattcataaattttttttcagaattgctaatccataccctagtactaagcagagtgcagtacttgtgtacatttctttttgcctttagctttgtggtattttctcaaaatacggttttctaatgatacttagttattttctttctcaagcccttcagtgtggttatgttagttatttgtaataacattagcttcacttgttatagtttgtatatctgtttgggttccctccataccttggttgattgttttaatgtacatacggtgaaattcactctgttgtatacagttctatgggttttacaagtgcaaagagtcatgcatccacagtcatgatacagaatagttccataaccccagatttccccctcacccctcaaatcactgatctggtttccatctctgtggtttcatcttcctggtatgtaatgaatggaaccagacaatatgtagccttttggatctggcttctttcattagcaaaatgtacttggtgttcataggttgccgtgtgagtagtatactgttgcatgggtgtttacttccttcttctaacctaatttgtgattcttgcccatgcatctaatgtttatatttataaaattgcccactggcttgatgcttattggattgctcctttgggactctgaaactgacttgaaactatgttttttatctccccttagcacagtttacctcacttcatcttatttactgtggttacttgccacaaccatcagtcattttaacattccaaggagggttacagccaacccttaattatttttggtaagtttgacagagagagaatggataattgaaatcttcacataatctgcaagccttataatagctacttcttcttccctcaactacttaaaggtagcaaaattgactcactttaagttttatatcctttcccttcctttacttatcctctggtaggagcactaatgagtcctcaggtgaccataaaaatggaaagacagagaaaaaggggaagcacaggctgtgggtaatctacataggagataaaaagcctctgagtcactgagaattgatgacactctagtaaaatagatctgagtagggattttgtgtctttgactatttttgattcctatataatgcttggtacttgttgattcaatgatggacttatggtcagtcctaaaagtccacctaaaataatatactcctactcagaaactgccaacctcctagctctattttccttcctagctgtgtctatgtgctctccacggcaaagcctgaggttaatttgtggtatggggagaatcttaattgcattaacgcaggcatttgtaacttaacatacatggataggtatacatagtcttttgggaatctgtgaactcttagaaattataaatagaaatgtatacacatttcctgggagagagaaccatagtttccatcacagttcaaaagtgtaaagcaaacaaaattaaggcctttgaccagcaagatcatctatagaactcctgtaatgctgacatactaaccctgagagccctcatactctgtttctgggagatcttcctttgaactctagaaacattcactagactataaattccttaagagaaaatattgaacctttttttttaatctccagcacctcacattagagcctgtataataggtatttgaaaaatacttcccgaattaatttgatatttttaggctgataggatttcttagtctactgatacaataagaaatctgattagcttatgttgtttgtgagatacataatttagtttgcaggaatccacaaagctttgtcatatatcagttaattagctaataaattaccaaattcaagtgagtttatgcagtactttttttcaagtacttcttatactcacaccacatgcctttctttcctaaatccctgtaaaacctagaaatatattgccccttctcttgctacctgatacagggagagtttgactgatttggaaaagaacaatatgcagtgtgaaatcttaacaaaaacgttttatgttagtgttttaaactttggtacacagtctaaattgcaaaaactgtgtcattatttagaatggacatgttccagcttcgttaatttataaattcctatagagggctttctggaaaaacactgataatccgtatgttcagtattctaaaaaatatacttagcctgagttttggaagcctagtgtgattctacttcatctaccaagtgctacccaatctcttttacatctcgccacgctaatctcttttacatcagataatggtaccattgaaaggtaggtagcacagccccatgctgtctgtgtcatttctgacccccctgactcaacattagttgaggcctaggctagtagctaccagtcagtgaaaagctcaatgagatatacttaaggtagctacattaattaaaatgcatatatacgtacatataaatatataggtatttcagtataccaatactttgcaaattgggatcccacagcctgaatttgacccatgtagaccttatttggaagccacagagtattaatttttaaaaaacatgagccaatatttaaaaatcaaggtatttcactaaacaaatttttaatttcaaaaatatttttaatagaaatcactggctcatgtttaaaactttctctataaatttaagtttcatgataggcttttatatattctacaaatttcttttagagctctagatctgcaattctgcgatattacaaagtctggaatcgtgttttgtctttcacctgtgaaaatgttactgttaatccacatatggtcaacaaaactggcattgagctgtttttccgggagaagtgatggattcatgctgctccatccacatattcttggcaagtgcccttttgaccactggcatgtatttttaagactctctggggttgggaggagagcctgtggtaatggaaaagatccaagttaactggcccacacaggggagccaacccatgaccttgaccccattaccacagtgttctaaccaattgagctaaataattgagtaattgtttcttagcaatctgatcaaatcagatggcttataataagactctgtctgtgaacaagcgtgaggatgtcagtgaacagagagcttaggataaggggaaagttatccagtctgcaggttggttggcattttatatttggccaagtagtcaataaattggactttgtcattatggctaattgcatttctgagcaatgagaacttaccaaaaaaaaatgaaactttaattaagtagagttttttttttttgttgttgaaggattcagatttttcagttcataattgacaacatatgtacaaacaactggggcaccgagcaggagggaaagaactttgtgctgagttgaggggttcaggtccctgtttgatcccagctacttagtgtgatagtgtgaccttaggtaggtcacttgactttctgagctttgggagggattagataaacatgatctcacagatccccctatccctaagaaactacctcttaatttttaaaccaataaaaatattttgcaacagatttcttcctaactaaaaatgaaaatggaatatttttcacagaggtagataattaaacaatatttcgaaagtatttattgaacaagcttatttttgaaatatgttggtgcttgcataaagtcagtcagtatataatatgcatatttcacacagaaatccaatacatttataaatacatagaccatagttctatatactatgtgattggttcttaatggcattttatatttcaaagcacttatgaatccccttgaaaatgttgccttcttaaataatcattgttttagatgcaagacattaatgaaattgctttggaattactattcatgaatcttctgatttgggtccattaatatggcctttgtagaactacctctcctccctctaacttgctaaatttagattaaataatttaagctcaggctttccttaccaaattgttcatttttctggttcttctttcttttctttcttactgatgcactcaaatattacttttatagaactgagataatgggtggatttattgttcttttatccaaagtgattcttccatcactggattgactggattagtgagcatgtggagctcagtaggatgggtcctggagagtgttagggttggtgtaaaatgaatgacaacagcttagtcacacttgaaaaaatatattggctcgagtttccaaataaccttccaaaatgaaaagcacaaatactgtgggtttctacagaatcaaatatgactgtaatgtttgtaaaaaggattagttattggaggtcacttcaatattaggtggggaagtttagaaatactaaaaatggggagaccagaagcattaaatccaaagccaaatacaggttgcagatgctctgggtaatggttgccagtccagccgtcatctgagtgacgctgctggtgttccctgcaccttccagagccgttcagaaacacaggctgccagtttttaatgcattatggcagattatgagacacctctgtcatctgaataaacacgtagctgggcagaagttttcaatatcagttctttatgtgataggatccaaaatttatctcatttttaaaaagagccccagagatgaggaaacactctctggtaaatttacttgattgagagtcacccacatttcttttaaaggtatgctcaccagagaccccatctggaatgttccactcagaggctcagacctctggttgatttaattatgtgcttcctaggattgtgcatttaattatatatacacaacaattcctagcaccggtttcttttgttattctgtgagaacactggcagccattttgaactgtggaagagtattctgcatctgcaggaattactcatctgtggtattgaagaaaggaaaaattagccattggtacaggaaagggaggaagaacaaaatacacttacatagcagaatagtagtttcacagtctagtagacaagcaaataggaggctgatgctgtggacagactataaatcaatttctgatttctttggtcaaattgtaaatcatcactatgcgctaagctaccatgcatttccaggtgagagtatacaatacttttgtgattgtgtgttgtttgtaatagctctttctgaattacaggtgattagaaaaccctgttagaaatcaagttgttgttgtttaattctggatatatttgctttagtgatattatgctgctggagaatggaattatatctacttttataaaactatattaaaatcccatgggaaatctatttctatgaaaaaaaaacttgtcttttgttcaggcccctctggataaaggggaaatgttgttgatcacaatggccccgaaatgactgtcccatcacactaggtcagctccttccagataaggtgctatgggtcctggagggtgcctagaatattcatgatgtggttcaatgaatggataacaactatacttaaaataatgaattactcctcattttgcagttggtaactctgtcttgctcatagatcccaaatttctaaactcaaaggagaagctaaggaaagagggggtggttctaaacttttaagaaacgaatggagatccttgtaggcaacattcgtttgacaaatttcatagaaacttgtgacttgttggccctagaagagtcaatgttgtcttatgtagaatttcatttgagacattcaggatataaatttttttttctaagtttattggtagttgagaatcagttccattttatggcctacttttaaggtacttacacaataaaaagagatattagttaactttaacatcaaaatattgaaatctgatcccttgccttacaaactaagttagggctcatattttccaattacctctttcttcaaaagaactcttctatgaaagagtacatacaaatggaggtattattattattttattattattactttttgagacggggtttcgttcttgtcacccaggctggagtgcaatgacgctatgtcggttcactgcaacctccgcctcccaggttcaagggattcttttgcctcagcctcccaagtagctgggattacaggcacatgccaccatgcccagctaatttttgtatttttagtagaaacagggtttcaccatgttggccaggctggtcttgaactcccgcctcggcctcccaaagtgctgggattacaggcatgagccactgcgcccggcctgttatttaaaattctcttaatggtaggatgcaatctaatgtcaaagatgtgtagcgtcaaaactttagagagcaaagcaacaacttgacacatatatttatttgatactttagattaaggaggccataatttctgaaactctggaatgaaaggtctaagtatgagatagacatcatgttttttatagaagacatcttgcagattaatcatctttaaagatggctttgggtttaaatttcattcgaggaataaatttgagttctgttgaattgagacatctcagaaattaacccccaacaatttcccttattcaaaattgcttttacatttatggaaaacaaaacaaactttttaaaaatcaaagttgagagctttcaccttttaataacagtttcaaacttaatatagcttattaagaattaatataataactctttttattgtttaagcctctcttaccagctctaccatgcattaattatttttcttcttttgtatttatacaataaatgcttgacaaaaaaaaaaagctacataatttaagatttttatgacacaatggaaaagtttcttacccccaggggaaaaaacaattctatgatgttctcattgtctttccaggcaaaattttatatattagaaagaagaagaatatgaaaaaaaaaaaagctctagttatactttctgtgatgtgcagcaggtttggaatacatggaacataaaagaatattacatgagctataaagggttaatgctgtgtgttcttaattttaaatttcagataaatatgatttcagctgtgatcctacatggactaattcttttgtcactcaactaattaattcggtatgctagagaaaagatgcgaatttgggcatcaaagaagtgataattttttttgtttaatcagttataaagataagttttactcccattagactgggtctggagcccaatcattttattcttgtttagtgcagatgaattccatagaaaatgtgccctgtttctcttaacatctgaagatggaacagtaggattcaggattcctgttaaaatggtcctttgcaaggtaattataaaaaaaaaaatcatttcttcatattgtccgtttgttctccatgcataacaaggcagacaccatcatctgttcgttccgatcatggaatatatacaaattgcccatgtgttactttatgctatggaaagtaagttgtatttgatgttttatttagagactgcagatgaggcctccagcttccacagaatttttagttagcccttgttggatttattttctttgacatgagtcagttttttcctttctgggcagtttgctgagatgaccccatttgcctgtcaatggtaacttcagagctgtttcctgtggggaccatttccttctgcaggatgaatctgtggccagtgtggagcaagctggggccaactgggcctgggaagggcaagtcaaacgggcaacctcccacagttgatagaaagttcagcagtgaagtatggtttggtctcaaaacactctttcctttcctagttttcgggtttccggggcaaaggaggtagagaaaagggaaggaaagaggaagaaggggatgttgtgggcgcacaaatgcgaaggcagtatctggctattgactgaagtctgaattccagccatgtgatctgtttaaggcagtgttagggctttatgcacatgccatcagttgtgtctatttactcaaccagccttcagaaaagcccgaagatccacttaaaaatcataatcatgaaaaggaagaagacatattttctactgctttgaaataagtaaacatttaacaaaaagaaaagcttttttaactattaagaaaacataaaaaatgcaaaaagatctatttccataatgttcctgttaaatatctgtcccagaaatcgtaagcatttcatctgagtcactaaggctcttgactaccatgttttgaagccagtgaaagtgtatgaaagcaattaatcaaagttcactgcgctcctgaagagtatttcttcttctggaaagcagaggggtagaataacttaaaactcaatgacagtgaataagctttttagagtccctgtttggatctgaaaatcataccttattagtatctttatctttcttgcccactcattcacgcttatttttatttaattttaatttctggcctttttttcataagtttccctttttttccccctaacagagtgctgctttaataatctcagagtacagtttttatttgctacagaaagctcagcaaaagcaatatccagtgtctaacaaatctcttaacttttcttacaaatcgtccattcagaggctctctcttttgtttgtttggtttaaaaaatattagttattggtgatctgtgctttactttactttctggaccctctagaattatttttaacgtatctggtatttctaaatccattgcatttcctagcccctcggtatggggaaagcaaattagctcagggattcccagcagctgaatttagctagagagctgcttaaggctctccccagcagatgttttatccacttagaagttgtagaacgttataggacctccctgctttttaatcctaaaaacaaacatcaacatatttgagatctgaagattccctgattcagaatgagaaattgccatgaccaccaatttcagggccacattctagaaatgagtgacaacccagagaaaagtagctgctacatcttggctggataaaaaaggttggccttaaagagggtagcagacacagataccagtgggattaaacaggtttgttgttttcatatagcttgtcatcatcttggaaacatataaacatacccaggataaatgtctaaataacatatcaaaatttaaaaatttaattagaaaacttaatttcagggtttaaactgcctgacccagttaggattaattaggaagatttttaatattgagtttgtcgttcgttattaaagcatcaactcactcagtttctacttgtgtacacatcctacaaggcaaatccctatctacttttgcatgccatggaacggatttagagtttaaaacacagccctactgttgtgaaaagcatcctgggttttgtagcattttgcctccctctttaaaagctacaggcatagccaaggcagtgtgggggaccagaaatagaattagaatatttttccttcttaatgaagattgatgtgcaacaaacacaaatctgtttattattctatcaataatattaacataaaagtgagtaatgtccttagggacccccaaaaaggggttgggatgggaactctaattggtcaattttcactgaatttttatcagtctcattaactctcaagtacaatggaaccatgtgagataaacaagaaaagaccttcgtgacacaaattttagaagcaaaagctgcggttcacaaaaccatatgagattacaatacatggaagttaatttcatcagcatatgcgtatgctaattcagaacccaatttagaatacatctgacaagagaaaccttttatagggtgaatttcagaatcaactatggaaataatagtaaagggcctatgaacttctctgcccctatattttgcttgaactatttcaaactgtgtaatttataaaatgtaaggagctatcatgcctagtttgtaagtcagctagttacagagtggacaaacaatcatccaggtccagaaaatactatgactgtgaagtttgtaggttttcacatgtgacattgttccacagatgtcagactttaatagtagcgatgactagatgttgcagttttttccaaatgcatcatagacacccaaagacgtttcctgataggagaaggagatatacagactttgtttcaaacttttcagctctctttggattcatagctaagcagctattttgaacaagagtgaatgaactttttccttgcctgactttttagttctcacaggacattgctcaggatcacttttgtatagtgtgtgcactaagaggatgtaggttggtggtaataactgcataaactgcccagtgtgatgtgggaggaaagttgtagatagacagaatgtagccaccttaagaagtgaactaaatgagagagtagacaggaaaaatgccagaggacaagctgtacatattgtaaatttgaatcattcatcagcgtatgtatgggagtctaggaggaatttgaatgtcatcattacttagaaaacccaaggaaagaaatagaaacagaagaaaatatttgctgagaaactaggagaaaactattaagaataatattaaaatctttattatatagaaaaaataggattctagggacttagtttaattgaggggttagatatttacctgacaatttatgttgttaatggttcaattctgtgtgcattggctattgtgatgtgtagtggctgctcagtaaggaatgaatggatgaatgaatgaacaaaccattatcaaattccacttttccagatggctgttcacaacccccctacctaggcaatataacaacattaaggaggtctgtgtggggggtttttctataaccctctctgaggttcttgtctaccttgggtaattcaatctttgatttcttaaattctactaagagatctcattttgtggatagaaaccatttttcttatacatgctgcatcacattaactgataaattaaatgccctggaattcctctactttctctttaccagctccataaacaagctattttcctctcctaggctgctgatctttctgagtctccttccatctaaggctaatctctccagagacactatctctatcctcctcccttatcaagaactttcatctcctatgccaatgttcatagcagccttatttacaatagccaaaagatggagacaaccccaaatgtccatcagtggatgagtggataaacaaaatatggttgtgtaactgcaatggaatattattcagccttaaaagggaatgaaattctgacacatgctgcaacaaagatgagtcctgaagaccttctactaggttaaataagccagacacaaacgaataaattttctgtgatcccacttatatgaatttcacatagaatagccaaattcatagagaaggaaagtcaaatagcagttaccaggcactggaggaaggagggagtggggagttactatatgtagagtgggtacacagtttccatttgagatcatgaaaaattctggacatgaatagtgtgatggtttctcagtgtgaatgtgcttaatgccactgaaatgtacactgaaaaatagctaaaatggtaaattttatgttacgtatattttaccttaataaagagggaaaagaaatttattcttctctgtcctccatctccgacctctcactctcttttcctttcagcaactgaaatattctatggtataagccaaattgaaaacctccatcttcagcactcgactgcacctgcagctacctccctcccagccaaccattacccagtctataatggttgtacagacacttatacttacccaccattcactcttcagatcatgcctacatggcttctgttcacactactccgctgacccttgccaaggctatgaatgactttatgttgccaaatctaatgaacgcttttcagtcctcacctcgttgggcatctcagcagcattcccatctgttgactttgtccatcttcttgcagcattctttaaactcttttgcaaccacattctcttgactttctttctagctctcttgctgttctttctctatctctgttgtccacctgcctctcccccaacccccactcgtgtctctgatctttaagtgttacagtttttcaggacttaggcatggactcatctactggaatttcccaaagatatattacaataataatcatgttttaaattgaatcttttgatacctcttcattgactcaccatttccaaatgactatcttctcttctcaatggccacttctctagttcaagccactgtcatctttcaccgattcctgcagggatccccagtcagttaaatcactggttttaattatgttactgcttttacttgctgctttttacttcagcatcaggatggtctttttaaaatattcatcacattgtatcacttctgctcaaaacacttggttcctctgccgtttctcctccactaactctgtctcctagtttcctcacctagcttctctgcgccttgaatgactgagaaatgacctcccatcactcttagattaaaccacaagcttctctcacacctgtccccattggcttttccatctgcatcctggcggagtttcctctctcatctcccagcctctggccttcttttactgttttgaatacatcaagccttccccacacatgtcctttgcatgtgctgtttccttcaccctcaagacttttctcccactcttcacttgtctggaacttctcactcttatattctcagcttaaatctatttttttcactgaggcatttcccaggcagtcacttccctgttattgtctcttctaacatcctttacagcacttatcacaactaacaattatggatatatacttgtttggtaactgtctcctctgttagaatgtaaatttcatgacgatattgtgtggttttgtatgccaacataatattaacctatatcaattgcttataatttctgacagctagtggatacctaataaatattttttgaaagagagcgagtaaggaaagaagaaagatttttccatgaatctgtttcatatgacctctatagaaatgaacagagaaatggacaggtgttttaagcaaacttataattcatgaacatctaaatttacataaagcgtatgttgaaaggtgatttttccactttacaaaaaagatccatcataagattctttaaacaggcttcccaggtacatgtaaaaaaagattttattgattaaagccatatgtttgcacagaattttttaggaaaatatcttttatataaagtaaggttgacctctaagcaatttccttaaggcacctagcccagaattgccaactctcaaatttctaaggtaacagataatgggaggcctggaatgcagtgcatatttgaaactctagaatataaagtagtaattttagccattcagggttcgtgacttttctcacaaaaatagctaatgggaagataaacctcctcaattcctctttctatatctcagtaaaagtaagagtggctgtgaaatgatccccacaaaggctgctacagaaaggaaaacaaaggcttggaaagtcaccaagttgaatctttccccctcactctctcccccggtccactactgccactactgataattaagttgtcttattgcaaaatgaaaaagaattcagtgtgttaataaataaaatgcaattaacttctctgggtctcaatttcctcatcttaacaatgcgggagtttttgtttttgtttttaagattattgttttataatgcttttcttgggcctacccaaactttacaaaataaggtaatttgtaatcattttctctggctaataaaataaatttcacatgtatttctgcccttcttattggaaacttgaatcgaggatcatgaactttaaatcaaagcatttataatatttgtagaattgcttgatttgactgttattggcagttcttgctaagaagaaaatactttgcagaatttactttcaactaacatgttttttttcttaccaaacatattccactgtgagggaaggataatgagctattgctgaactgcagtacaagtcaaacattttagctaccagaaacaaaaataatttattgggtgtggtaataaacatcaaggtaggctaggaaatggttagttttacccttcaaaaacaagactgcttttacctcagaaatcccaaaagctgcaaatataggagaaataatatgggacatggaaaaaaaagaaaagcctgatacctgtaaagcttttggcaaaatttttgccctcatcaacctcctaaagcattatttctaccctgactccccaccgtgttgaatattttgcccaaacattactatatttaatgacattttaagcaaaagttatgtatctcaagtgatgtactgagctattaacttctcacgtaaacatacttagagtaataatgttgacccctaagactcttctgcatgggtctggaatgctaaagaatgtattcatgaaaacattatttagctatctcctgctttgtaggttaaggagaagtcttgaatgtatcaggcaaatctgaattatatttgaaagttaatgttctggccgagcacagtggctcacacctgtaatcccaacactttgggaggccgaggcaggcagatcacctgaggtcaggagttcgagaccagcctggccaacatggtgaaaccctgtctctactaaaaatacaaaaaaattagccaggcttggtggtgggcacctgtaatctcagctacttgggaggctaaggcaggagaatcgcttgaacccgagaggtggaggttgcagtgagccgagatcgcatcattgcactccaacctcagtaacaagagtgaaacaacgtctcaacaaaaaaagaaagaaagttcttatatttttgtctgtatttttctcttttccgtacttctgtaaatgatacatggatatttcttcagtgaaaaaaaaggaataaattcagaaagggaatcaggaaagagagaaaaggacaaaaaactagactgggggatgatagcattagagctgacagttggttcgccagagtcccaagactagactggctacaaccaaaaaactacagtaggagtagagagagatggagagatggcaatggagggagaaaatttaggaaagaagacttgctaattgaaatagtaagttgagaaacatgcagaatactggaagaggcttctaggaaaggcaggaccatggcacaattatgaatataagcaatgccaccttccaggtgtgatactcagagctccgacttgactaacatcctctactatgggtcaaaacacagtctaggaagctgcaaatagatgcccattgctatgggattctgaagaagacagaaacatgtgcttgttttatgattcttctattattctgattgcttacagtacaggactttcttcaaaatttatatgtcaggtcctcatgtgaggagactctgattctctgtgtgtgtgctggggcagggttgggggtatgaagccggcccatacatgtataatttgaaaaagtctaagaatcgctgggcacggtggctcacgcctgtaatcccagcactttgggaggctaaggagggcagatcagctgagttcaggagttcaagaccagcctggccaacatggtgaaaccccgtctctactaaaaatacaaaaaattagctgggcatggtggtgcatgcctgtaatcccagctacttgggaggctgaggcaggagaatcacatgaacccaggaggcagaggttgcagtgagccgagatcatgccatggcactccagcctgggcaacaagagtgaaactccatctcaaaagaacaaaaacaaaaaatctaggaatctccccaagttttttttgttttgttttgttttgttttttgtgtgtgttttgttttgtttgtttgtttgtttttgagacagagtatcactatgtcacccaggctgggctgcagtggtgccatctcggctcactgcaacctctgcctcctgtgttcaagtgattctcctgcctcagccttctgagtaactgggactacaggcatgcaccacgacgcccggctaatttttgtatttttagtagagacagggtttcactatgttggccaggctggtcttgaactcctgacctcaggtgatccacctgccttggcctcccaaagtgctgggattacaggcgtgagccaccacacccagctgcatcttctttttttatttcaaatgtgcagttttcattttcctaaaagtacaaaacatatatggtatttttgtaaagcatcataactgccactgtgcccttgtaactatatacatcccaggcactcaggaatgctcagaacatactaacccagagaaacctccctttctggggaattgtattatattttcattgtgttccagagctgactcaggaagctggggctgcattagagagtgattgtgcataaaggaaagcgtacaggcagagatcgggttctaatctcagccctgccctgactctggtgggaggtcttggtcaaggttcgacacctctcagagcttttggttcttcactggtaaaatgagagcattgaacgaggtgttcaataaggcctctcgtggcactgtcatggtgtaattccaggagtttacctttaagtgccaatgacactggagctcgggaagcctgcttaggagattgataagcttttatttatatattaatgataattctttagtttctcactctctattgcattaataggtcatcataattagtcttgaatatttgtctatctaaataataaggaaaattttcaaattatgtatgcttaggctgccccttctcccctaccttctgtcgacacatacaaagggaatcagaatctcatcacaggaggacctgacgtacacattttaaagaaagtcctggcagtagcttacatctataatcctagcactttgggaagccaaggtgggcagatcacttggggccagaagttcaagaccagtctcgccaacgtggtgaaaccccgtctctactaaaaatacaaaaattagctgggcatggtggtgtgaacctgtaatcccagctactcaggaggctgaggcacgagaatcgcttgaaccccgggtagcagagatttcagtgaacgaagatcacaccactgcacctcagtctgggtgacagagtgagacgctgtctcaaaaaaaaaaaataaaaactaaagaaagtcctacctctaagcaacctgagtaatagaagaatcacaaaacaagctgatgtttctgtctttctcagacttccataaaagcacgtgatattgtgcatgatgcatgataaatatgagtgaaaagaaggaaggaaggaaggaaagaagagagaaaagggggaatttcataatggcattatttttctgctttcattatcttattttagttccattttatgcaaaatgatcttgacttacttagaataaagaagtatgacttaatgagctcatcccataaatatcttagctctaccgcaaaaacaatgtgattattgttaacagccttctccttcacgtttcactagatttggaaagaagaaagaggataagggtggaaaggctgagcagaaaggtactctgaaacatggtggcctgagagaagaagagctggagaaaatgaaagaagagcgtgaaaggtgagcagaagtgccgagaccttcattttctttgactctatggtctgggtttaatttagatattgcaacagtcaactggagaaatttcattttaagaagtataggggttgaccgatctgaaaggaaaggtgtctgatacaaaaagaacctccctttctggaaatttttattctattttgagaagaaatttgcttcatgtttttactatatcagtgcctataattccataacacactaccacctgttttgaccataaaaatgcatattttctccatgtctttttttttccaaagaaaggtcatttggatattgatgtttagaactatccagttcccatagtctgttcctaattttagtcaggctgttgtataccttcttaattttattctgcgcaatccgtttgggtcctgtaatttgagaagtgaatgtccttcattctttaaaaagacactgtcttttattaggctatcagcaagctgaagagtatgttgcccatctgttaaagggccggcttcatttgctggaataatgctggtttgcaagagctgaattctcctgcttgaggagcttaatgttccatttggacaagaggtccttcacgtatctttgatgttaactctggcacttatcgcaagtggatgtgtaaatgtctgattttcaaacatgtaattgaatgttcatatttctcctgaaaattctttgccttcacaactaaatggagcttggagaaagactgagattatgacaaaaccagcatataattctaagcgtttgattctgacttcatcgtgtatgtactcagatttacacaacttttcacttgcttattagttacattagttcttatagtttctaaagagaccattcttgtattgattttattactttagtatgtgtactaagaaaatcatatctattcattgtgttttctagcacagaggagtctaagagtatctactgttagcctttgacccctattttgtagtctgttcccgttgagaaggctgactttttcaatagcaaggaaaaaaagctatttagtcctttctcatttttgagaggttgataagctgagttctaaggtcactggagcagttaaaaggaaatcaagtgttttacattgttgttgactattcacctgacagagctatcctgaagacatgaaagatattctccgtcataacctaagattcagcaatcctgtaatgtaaaatgtaatccaggctgagattttaatgcatatattggcaaaggcatctatgtggggagcctacatcatagatctttgctgctcccttgacttctcttactgaggttacatcccatgcctcatcttcaggaaactgagctgttttctagaatgcagactttacatttttttgtagctcatacttacttgggacaggggaaaaaaactcttagtagctggggaactgtgtgccagctagaaaattgataacccataaaataaggtgagttgtctttaagcaagggttcatttcctttctggttttgcctttagtaggcaggtgcctgagggagccttgttcttaaaagctgagctgtaaattcacttcagctggctgtataggcttcggatccaattttcttaaaatatgtctggtcaaaatagtgaaagaactatactattagcctccacttaggccacttcccacacatgaacacataaaacacatctgataggggtttcctagagacaacattgtctcaatcatgtgctagaggaagaagttgaggagttgattttatggttgggtgctatagaattaatgaccaaaggcatttcaacagctcaggggctgagagccacggatggtggaggtggaggctgaacatctggcattgctcccaaccctggagtcctgatccttagctctccatcatctatgggaaaccaattcacaactcttaaagaactcagcgagtgtatcactcttcatgatatggcaatgaaaaaaaatagaatagagtaagaaatagtgataaaacctattatacttttctcctaatatgtttgaaatttgtttctttgacgtgattcaagccatcctgttgcttacttgtctcatcctgtcataggtatcataatagatttacattagcatatctcattttcaaaatatttaatgcacctaaataaaatatataccataaagtactggagccagcttgtaccagcttataggaaccaattgttaaactttcaagaattttgtaagctggctgataagccattggcagttcgacattggctatagtgagtatatttatagcacagtttctctgaagacctagtttaccagcacactgctacaggtctgtgacagctatctttagtgcatatccaggaggcaattatccaaagaggcaggaaaaaaaaaaccaaattcaaccacatgatttcttgtagctgagtttctcaaaatgtggtccagggaccaactacatcagaatgaatcattagaagaccttgttaaaaatgaagattcctgagccccataccagacttacagaatcagaaccttgggagttggagcccaggaatctgtgtttcatacacaagcccaaggtgattcgtcagcagtctctaaagtctgagaaccactgacttggaggagcagaatttggctataacataaaactattcttatttagtgaaaaatgatacacaggatttttttctcaaaaggactgagtggcccagtctacaaatattttccttgttcttcatgtaccttctccgaaatatcttttcttactggtacaatcttttgtaaacaaattagaaaccctagccagtgctcactcaattaagggaatatgggtcacttgcccccagcacccctcatgcacacaaaacttacaaaagcaatatcagttcattaagaaaattttggaaacataaaaagtataaaaactattaaaaccatacataactctaccataatcccataaccactactaatattttataatcttttttttatgcatatacagttggctccatatccacgtcttccacatctgtggattcaaccaaccgcagattgaaaatatttagaaaagaaatttcacaaagttcccaaaagtaaaatttaaatttgctgtgccaagtactacattgaagctatgcaaatgaagtgatgtgtaggcactgtaataggtattataagtaatctagagatgatttaaagtatatgagaggatatacataggttatatgcaaatattactccattttatatcagggagtcgatcattcacagattttgatatccacagagtgtcctagaactaatcccccatggataccaagtgacaactctctttgaacacttgatatccaaaacctgcatctataacatcttgcttttttcatagcattatatgttgaacatttttcccatgtcattaatgttttaaaatatgtcatgttgatcactgcctaatattctatgagatcaatatacgataaactatttaccttccattgtcaaacatttagtctgttcccatttttatcccttttttctttcctttaaaaaaaaaatggagacaaggtctcgcgctacgttgtacagactggtctctaattcctgagctcaagtgatcctcctgcctcagcctcccaagtgctgggtttacaggcaggagccaccatgcccagactgttgccatttttcactgtttcaaataatacttggatgaatatccaggtacaaatgtctttataagttacctcctaaatcatataatcctattgaagttttaatttccttgtaatcattttaccctaggattgatctaacctcaattctaaattttaggattttatattctctctccccattcatctaatttttttgtgctgattttcatatctcattttaagttatctacatatctaattcctgatccgaaaccattttgctgctatatatggatagtttatctatagctacatgtactgaaaaagtccaaaaagccataaaagatgagttgggttactagattagattagaggaatgcagagtctagaacagtggttctcaatgggagggggcagttttaccacaagggcatttggctatgtctggagatatttttgattgtcataactcgggaagaggggtgagcagttactgccttttactggatagaggctagaaatgtagctaaaaatcttacaatgcacaggacagctaccctcccccacaacatgaatcatccaacccaaaatgtcaatagtacagagtctgagaaacccttttataatctccaggcttcacaaagagcaaggtactctcctagacatcagaattgcattgtgtcatatttcctgtggataatgcagagaaatctagatcagatgatataaccctagaaggattattagctatttgagaatggtacccaaacattactgatgaatatcccatcaatctaagcttgcaagaataatttttttcgttaaaatttatttttaaccttggcctgctgagcatcggcgttagtgatggtgacccgttgatcagattgtggttgccacaaaacttcaggggttgacaatatgtccgatgacagaatcagcaggaacaatggactgaattaaacgtaaagaaagttaatggaaataaatgtaaagtcttgcatttaggtccaaaaatgaactacacatacacaggatgtggaaggtttgatttaataacaaatatatgaaacatttgcctgatggttttagttgagcataagtttagcatgagtcaacatgtggatatgcctgccaaaagcttaatctggtcctaagctacattactggaagttcatgtacaaaataaaggaagcaacaataattctaattttacactgcttagatcacacctggaatatcccgtgcctctctctcacacagagcatgcgggtactaaatccaagtcttattaaaaatgttgaaagacctgagaatacacagcttacagaatcaagactttgtggatttctcatgcttgaagaactgtcacatagagattagatcggttttgtagcatccattttattccgttctactttatcagtttatttgcttattcatccattcatttatttacttttttgaaaacaaattatttgctttaatatttattttcttatttatgtatttgtctcttgaagatactaatggagcattattttaagagaggtagtattcagcttaatggaagggaaaagtccttaaaattagggtgcagtatgaggcagtgagtttgttgacactgaaactgttgaataagaagctaatgaaatgattacatttagaaagcattagttcatcacataaatattggactagatcagagttgtataaatttcagtcactgatctatttcctttattgtcttaattatatttatacataatcaaataaataaaatattataaaaatcatagccatgtaagttagcttatctaattaagtacattaagccacatagcacctaaaatcttcttgtgtatctttttttttttttttttttttttttttttaaagacagagtctcactctgtcaccaggctagagtgcagtggcatgatctcggctcactgcaacctccacctcccaggttcaagcgattcttctgcctcaccctcccgagtagctgggactacaggcacgcgccaccatgcccagctaatttttgtatttttagtagagatggggtttcatcatgttggccaggatggcctcagtctcttgaaattgtgatccacctgccttggcctcccaaagtgctgggattacaggcataagccactgcacctggccttctagtgtaccttaaatgctactttgtccttagatgatctctggggttcttttcagatattccagtatgagaaatatctaaatatcttaagtatggaagcatttacttttacttttctagagcaataattattgaacttgtcatggcattggtttatggtagtgcatacaccattgttacctgagtgtataagcccaagtttcttgctcaagattgtgtggtaggattttcttaatctcaagtaagagatttctcagcttatgatgtgtcacctcctgttacaagtcaaacagtctattgcaatgaagccctgcattaaataaactcatcattttgttcatgcttcagtgagattagccataataaaagattagttccaaaggcccatattcattgctagagatatgaacccagtgttatattcaaagatgatttcttccaacatttttcaaactaaattaaattagcatttttcacacattcagattatgtaaattagcatcttgagctgaaagcaagagattgtcttaatatgtcagtaagtatatattgttgttattcaattctaagacctaagtttgtaaccttttacaaagtatgaaattaatcagaatcttggacctgtaaaataccaaactaaatacctgtattcttaataccatctcaaaaatccagtggagattggttaaaagaaaaatatgtccccctcctcatcattaatttagtattactatcctgagaaaaatatctccactgacaccaaagactgtcttccattgaagtcccatattactgaccctgaaataatacttcagtaaatgaagttttctcctaaaattgaaaaaaaaattttaataacatgagttatatactccaaaatcttccattactcttataccatatcagagtttattttgcaggaagctcatttgttgtattaattaaacattgctttcgtagatcttactagaatcttagcaggatacatgaggagatgggagaaaaaaaagatccaacctcttcagcttcagcattgaaaagtatgaaaacatatggctcttgttttcaacaactagcctgaacggaatgtctaagtgagagtgaagctaagatttaggaaagttaatcggtttcagtgtctgaattcaaggttcttagttttctttccttttgggaagccttccaagaactgcagacttctcccttgccttatcagctgagctgcttgtggcctgttccctttagtttaaatcaatacatgtgtttttgatatttggcaaaccaagatttaattatgcagctgcaagttccccacataaacgaaatgcatcttagagatataaaaacattcagaaaccatttatagtttgagaattcaagtgggtgaaaatctattcccaacctctcagcattttatttaattatggaggatttttatgttactggaaattgaaatgaaaaccagagtaaggctagagtttatccaacatttgttcatattgaaaaatgaagatgcttattagagtcgaagaaggaaaaggaaagtattacattctggaattaatattttggttgtaatctacacacatataacgctcctaaatatatacagcaacaagtgaattgatagtattttgtcattattgtacactcaaaaaaggatgtattaaagaaaccagaaggttgatttctttaatttgccaagcaattctcaataattaattatttactgaacttaataactttggcactatttaaactgttgaaaacacccatgttttggcatgattacatacacatgattaattcagcatggttttactcatcactgaatatccctatcttttgcagtagaattttctaggtcctgtggtttgggtaaaatgttggaatgattcccagttttaatagtcccaatttattattactagtgaaccctgatcagatcatgggctggattagatcccagtttttcaaaatgccccaatttatggctcccttaaaatgctggtaaaaatgtgtatttgaataaggctttggttggctaaaaaagatccagttaattacttttagatccttattagatcatcactgcatggaagttatgaaaaatcttacttggtggtgtttctcaggacaaggacatgttctctttttatgctgacagaaagaagctatcagatttctgtttttcatagtactaaccaactcagtgaatgaaaagagatctttctgtatccctgtgattactattgatgctcgtgtaaaggtaaaaatatccatctttcctagaatgagaattaaaaatatagagagagaaagaacataaacacaatggcatagtagccatacacccacactactctttatttgggggccatttttcaaaatttgcctctgatttagagaaattagggatttagacacagcccggggtgaaggtagctttaatatctttacatttatttgatctctgtaacacctatcttctcagaaatgcttgcggtcaccaacaaaacttggcacattactgtatttctatagaccagagatggaaacacctacatcctaatgccatgccagcattttttatgagccaaaatccttttatgggacttgaatcaatgttagaagtgctgtattagcaactgcttgtcagccgagctggattaatacataaaatgaatcacttgactggcatgctttccaacagtcatttaggcaaacttctatgaagtacaccagctctctacaaattgttttaaataattttaaatatttttaaagaattcatgtaccctggagtgatgtattactttatcgtatgtagttgcagggctgttggaatacattctgaaaaggaattatactgaattacctagaacgattccacagaactgtttagagtatctgacctgataaaaatgtggaaagaaattttaaatttcgctgatccaggatatttggttgtaatataaacgtattaaatacagaaatagatattcaatgtaatccataatttttttgtaattcactggattttatgccaatcagagataccagagctgtacctcagagatacaggttgaatatcccttatccaaaatgcttggaaccagaagtgtttcagactttgatttttcttttattttggcatatttgcattatgtttaccagttgagcattccaaatctgaaaatctaaaatcaggaatgttccaatgagcatttcctttgagtgtcatgtcagccctcaaaaagtttcagattttggattttcagatttgggatgctcaacctatacagataaatttactttaatggggattaaatacagcagtggcagaatttgagaagagcattttctgtgaaagctttgggggactgtaagtaggtagaaggctgtttggtgactagaatttaggaatgagagcttctgttttattattcattttcgtggcattggataagccacttttgaggatgtattcttatagtttctatttttagtaccatgaaataaaatggtaataataatacttaaaggccccagtttcctacattttgtttggataaaatgctttttaacttctaagatctttagaagaaaaaatttgcgtaaataaaagtttagtgaacccagaatattttctgtaggccggtttggggctggataatatactagtaatcttaatttgctgaaactggtctctgaaaactgtggatatatcaaacttctgtaaatcaaatattttaaaagaatttgtaagtctctcatcttctttccttatttgaacatttgttatatcctgctttgggaagctttcatgacaggccaagtgtagttaatgttcacataggttggcaaactctatatgatttgaaaggatgctcaatctattgtcttctggaatcttctcccccgtcaccacccggcctccacccgccccatacccttcacatagaaatactaacctaggcctgtgatttacaaactccaaactttgaatatgctttttctgcatttcctggacagctttttacatcagtggttctcaactttgggtgattctgaccccagtgggtatttgacaatgtctgagaacatttttagttaccatactatgggggaagtgctactggaatctagtaggtagaactcaagcatctttctcagcgtcctatactgcataggacagccccctgcaacaaagaattatctgactcatgacatgacttgtgccaaggttgagaaaccatattttagatagatagatagatataatagaaatatactacagatattttagtaagtctgtagttgaacctaaggatatgtattttgaaattatttctcaagtgattgtcatttatagccatgtttgggaccaactaatgtaggtgatggccccagagagatgcatggccaaatggaaagattacaaggcccaggagtgggttaaagatgactctgcatgaacaaacttatctgcttcaagtctcatgtgttaaatgagaaacctgtctttcagattgttgtgaaaattaaaagcaatatttacgaagcacgcactggttcagtctaggtgctgactgttattttctgacctgctttgggaattaaaaccccagataacccatacagtagcctttgggagcctagaatgctctgagacacaccatctgtgaaagttgctgaattggatcctgttatgatgaaggaggccaagttgagcggagactttgcccagctgggagtcatgccagatacttccattcaagaagcttctcctcattttttattgatcgccggttggaagttgctcctcaagcatagtgagcttggcatgagatggcagcacagtagtgtggggggtgctggctgcagccagttcttggcagccctggaaacacattcagggagaagggacacaaatggtgtgggtgactgccagcctctccaagtccacagggcgtgtgactgcagaaaacacttgtaaccactgtcattaaattcacaaaattctcatatttgcatttccattctatatattacattaagggggtggcaactccgatctgctaatatttggaatccagtctttggaggaaatgggatgaaaatgtccttttcttcccattccactctttcccagctacctgcctttgccctggagtataattacttaatgaccttacagtgcatctgaaggaaattcagattgctgtcccaaggaatctgacccctttcccaggcacaaactcctgcctttttctggtttgtgtcctttgttagcatctcatattgagagttagagaggctgaagtggtttgggctgtgcacagaagtggcacagaagcctgcttctccaagaggtcgtggaaaagccccctcaaccatattaaacaacagtaacaacaatgggctgtttagatggaagatataagtattcatgttcttggagaaacttacatagataatttctgaagttatgatttcttgaagcagagattattaaattatgacaggttggagatgaatgaatcagtgataattgctttgatcaaagtcattcctctctctcaaactttcagtggctctctattgcctactgcatacagtgcaaactctttgtcctaacacatctgactttaacctttctaatcataatttccacccctgaccaatatgacccctatactcagccaatctggaatgttcatactttctgagattaacactttccaatcactgtgccatttctagtaccatttctgctgtctggaatgctcttctgtctgagttggtccgaatgaatggaaattcaatgaaacctcgctttctccattataccttctcaaactacctaagttggaagagaattcttccattacctatcctgggtcaagttgcttgattgtggtaattttcagtttctttacctacaaaatgggtatataacatcataggaatgttgtgagaattaaataagactctgaagtgaagcattcagaatagtgccaggcacagagacagccaataaatggtgaacttactatttttcttcgtctttctttgaaagagaatgaacatgagtatcaaactgttgggtttgaagcctagctgttccctgtactagctgtgtgatggtgcatgttctgagaaaactttctgatcttgatcatttgaagaagaaaaaaaggataaaaatatctagccttcagagttcctataaaatttacataacatgaaatacttaaagtacctagaactgtgcttggcacataatagatacacattgtcattattattgttgttatttttctgcatggaatcgtagatgtttgtatttacaaacatgccttctctcccttactacctcaccatttccttggggtgaggatgatattgtaatcatttttctgtttctctcaggatctaatacattatgtttcacagaataggcactcaataagtagttgctgaataatggatgaatgaatgaacaactataaaaccgtactgattttaattttatttttcaagtgaataattgctgcaatggaactaagagcagaataggctaaatcaatggtagacaaagctatagcgtttagagatataagactttccctgggctatgaaatggtgtcaagaaatatgaggttatttgtaactggcagtaggacagtggaaatgaatcattgaagcatagtggccagtccatcaggactatcaacacttgtttccctgtggctgaaccagatcctgagagacacagccttaaagtgaatgaaatttcatccacttcacagggaaatgaaaatgctgtgggcccagagagctgttgtttgttgttgttttcaaattgggcttgtgtccccatcccctttcattgacttaaatttaatcagttgaaattagttttaagtaccatttattttaaccttttaaaatggaagatacgcctttttagggaaaattgaatttggttgtatggatgagacacactgtccttggcttattcttgtcaaatgaggatatttttgtgctgtattttgagctgattcagtcagaattcatggtgctgattgtattttgggggcaggcataaaaaactaatgtagatggaagatcatgaaaaatggcaacagccatttgtgatgtatcagatgccatcaagctactctttcaaggaggcaataggactaaactccaagcccgtgattaggagtccatatcataattacattagagcctttgtcttgtaaaatatttctaatctatattctcctgcaattacatgtcttttcttcatgtctaagtcctaattctcttgaggcatagattgtaacttgtttcattttcttacatctcagtaaagagaagatattcagtaaagtcctggttgacttaaaagtataaaacagcattaaattttgagtaagttacttagataatttcaaaaactgacaacattttattaatcagtaggaaaagaataactatctattaaaatatcttgccaaacattcttgcttatttttgaaagtatagtggcctccttaaaaattaccttgattataatagtatgtaccagttttttaaagtaaagaacaaatgagtagatgaggaattgcttagactaatcattttttgaaataatagtggactctattattgacagcatcaacagctaattaaaaattctattagtgaagatgtaaaagatggcacatttccaatctagattgacactgaggacatagacataattgatatttgttcaataatcctaaaatgtttcacagtctctaatagaggctgtgattgccaaagaaagtttcaagtgctaaaaatatatatattctaggcacttaaagatattttcagatcaaataatgcacctttaaaaaaaagtaaaattttagctgaatgagcatcaaaggatattttagtgggttgactttgttttaaaaaaaaacacagagtcaagataatgtatggtgtgattcacatgtttttaatctggttatagtggatgtaataagaaagtcaaaagaggataatttgctagttggacttttaaattttagagaagtattttgtaatggtcacataaatgaatgcatattgaaaaaatctgcaatgaccattaaatattccactttggaaaaacaagatcatagctttaacaaaatgcttcaatattatagttcactgcttttgacaatattaaacccaaattgaatatgtttctatataggatattttcacacggcaacttaaaaacttggcataataattttcctacttttgataatcaattctgctcccaataattatagatttacctcaccaattatttcaaaggatggacagagaagtaaagccttgccgagaaaggtagtaagtgaaaccagaacattttacaaaatgttaagaaatgggcacttaattcttgaggaaacataactcatttcaccagcaaacaaaaatccaatgccaagaaaactgacattatgctaaaatattcaatgtctcaagtgtgtatacgacttaaggtaaaaatggatgcctaatatcatcagtgaccaattcatcccattgaatgaaaaatattcagaggaataagcacactctactgaagctagttgtgcaatcctcattgatcaatttgaaataaccacctacagatatcaattaccttggtccatactgctcttgctcacataagcttgactgtgcctcaattcaaagaaatttttttttaattgtgacataataaactaatatgatgtgtgaaccaacatgggaatttaagttctcaaagatatactgaaagattttgcctctgaggagaaacacattttactaaaatcatgccaattgacacaggaaatttgatgaagatctccaaatatcacagattaaacccgaaatatgtagtatgtttttacaacttttctagggcatttgaaaacatatgcaactatgtagacatgtttatgattctatttacacattcatttttacattgccctataatcagatgacacaggaaaggaattttttttcatttgaaggaatatgagaaacagtttcaagcatagactagctgaggagtagggggctttattttattactttgtgacatcctgagggcatgcttctggtatgaagaagacttagctgtctgaaagtattcctgtttgtgagaatacctttaatgctgtgaccctgggtgtgcctgcatgtgtgtgtgtctttgtgtgtgatatagttacatagatagataatatgtatataggcttaatagtgtctggtaataccctgctacatcctcttatgagcatctgataaccattccttaatgaattggaaaagtattattttagttaaatgaatgattacatactacctgttttcatgctgtgtataaaaggataccagtgaagagaattaggttcttggagaaacagggagatgttgaaaagcaatcaagaaaaatgttgggggtaaagggactggaacacctgtggggaaggcaccattcctcctcacatatgtcttcatccctgaaaatctgctaagcccttggcctgcaggtgagcagcatgcacaaaagtagatttgttaattttctgaaaagaatacagctggctggctcaaagagttaaggcaacatgataataaggctgatatcatataaactatgcccctttatggaagattgatgcattaaaaaaaatcatgtaagtatccactgtagtgcaagtactgtaatagatgctaaggactcaaggattaattttttttttaaggagaaataagatttcttggtcttcttacaaggagctcaaaactgcacttccaaccccaggtaaacatctaaaaatatattctgttggaccttcaaggccttcaggctaagggaacaactgaacctttcttttcttttcttttcttttttattttactttaagttctagggtacatgtgcacaacgtgcaggtttgttacatatgtatacatgtgccgtgttggtgtgctgcacccgttaactcgtcatttacattaggtgtatctcctaatgctatccctcccccctccccccaccccccggcaggccccagtgtgtgatgttccccaccctgtgtccatgtgttcttactgttcaattcccacctataagtgagaacatgtagtgtttggttttctgtccttgtgatagtttgctcagaatgatggtttccagcttcatccatgtccctgtaaaggacatgaactcaccctttcttatggctgcataatattctatggtgtatatgtgccacattttcttaatccagtatatcattgatggacatttgggttggttccaagtctttgctattgtgaatagtgccgcaataaacatacgtgcacatgtgtctttatagcagcatgatttataatcctttgggtatatgcccagtaatgggatggctgggtcaaatggtatttctagttctagatccttgaggaatccccacactgtcttccacaatggttgaactagtttacactcccaccaacagtgtaaaagctgaacctttattttcaggaggaatacctgagagatcaccaaagggtagagcagacttgtcatctccatactcaaaaagttgcatagtctctcccatagtttattggatgcctctctttgcatctcatcctcatggcccccagcctgatctccacaggctagagccttccttgcaagatcaatccagcccccttaacctttcactgaaacacagaaatttttctgaatctgctctgcatttagcagttgtaggcaccctgcagatggggcctcctctggaagctggccttctccgggaacccccagtggaggcctttattgtgtcccacccactttgtgtgcacttgaaaatctaacaagcatgtgttttcctaataggcagtactccttggataaactattgttaatctgtatcatcttgtattctcttgtgtctttttttcttctttcctcatttttcattttttacgttttctcatatgaaaggtcacctttacttggtcacttcagtggaatagttcccaatttcaggcctaaaagcttataagaaaaatgtgtattttgatgaattttcatacttttgatcatctggagaactaatgtaatctgttttaggtccctggacctttttccttgagatgtgctgtcacacctttgaatctgaggttaaattgaagttatatgaaatttttccacttagaggatttgggtagatatcttctgctatgattcacttttgactttttaatttttttggcctgaactcttcaataattcagcaaatattaattgagcatctaggcacatgagggaaatggcaagatgcgtaaaacacaatctagtccctgccctcaacaagttcatgattaaggagagagcagagagaccaatacactaattataataaagctaactatgataaatgctgaaagggggtttaaaaatgctatatgatcacagagaaggcagccatgagaaaatagtgttgtagctgggacaataggacacaccctctttatcacccagtatttccagacacttgcaatgaaatcattagattcaattataaagtacaacttaactgtgcagcaaattagaagagactttaaaaaatttaaattcttaatcccatcaataatacatgatatttttgctgctgactagagagaaatttaagactcagggaaaattttcatttaaaatctaagggattttccaagcaatcagggtgttttccattatagtttctttctctaaagctgacagaatatagtaaaaagtttagggcaaaactttctgggaaaatagcagttgagacaggcagataactttgggtcataaatttatattactgaatattctgcagatacatacaaaatttatttaaatattttaaactataaactataatcttagtagcctagaatgtttggccaaaatatttctatacttataagtgggttacaaactattcatttgtatatagtactatgtaatatatatacatacagtaatacagcactgatatggtttggctctctccccacccaaatctcatcttgaattgcagctcccacaattcccatgggtcatgggagggacccagtgggaggtatttgaatcatgggggtgggtctttcctgtgctgttctcgtgatagtgagtaagtctcacaagatctgatggttttataaagaggaggagttccctgcacaagttctctctctttgctggccaccatccatgtaagatgtgacttgttccttcttgccttcgccatgatgtgaggcccccactagccatgtaaaactgtgaatctattaaacctctttttctttataaatcactcagtcttaggtatgtcattatcagcagtgtgaaaacagactaatacaagcaccatagtaaaaaatggtggagcaaattgaactttctttacagttttgaaaaactgaagaggccaactagggtgaccaaaggtcagttttcccccatctattgacatagataaggcagaccccagactgccagaaaaaaacaagttccatattacatacaagtcacttactctttaaacttctcaagttagtaattatcccaaaacttcattaatctgcagtctcttctgaacactccactagccaggagggaaacggggaaaggggagaatcaggaagaaataagaaatgcttcccagtgccaggcacatagtagactctcagaaatgtggattaaatggatgaggtcaggtcacagctaatatttagttacttcattgtgattcctccatacctcaagggttacaggatgaaaactgcagtggagaaggatggtcttcaaatgatgtccctccctcttcaaaaaaaaatctgttcagtgaatgtggctaaagcaaattaaaggattcatatattttcgaaagatttgcggccaagagattcgaaccaaaagcatttgctgctttactctcaatcaagcagaaaattcaattaaccgtaacacacctggtcccctgagcattctggccaatccaggttatacagcattgattaaaagtatctactctctgtctagggttccaggtggaattgagaaggagctaaaagaagctgtgtttatgcttttcaagagctattagtggtgtgtgcatgtgaagactgcataagtatctctgttctctgctctctcatctcccctgtctcagatgtggataactgttactgttattcctaacaattgctatgtacgtgccagccacactcttctaatagctttagtagtattaggtcatttagcctttttcctttggggcaggtactattatatctctcatttgcaggtgacagaaaggttaaataatttgtccgtggtacaaaattagaaagtggcagagctcagtttccatcccaggctgtctggctccctacatcaccttgcttttccatttctgaaatagcagagtgttcacatatccatcaacacctgcaggtctactctgaaaaaggctttgcttcagtggaactgtctgggtgaggaggatgctgcctcccatgaagatcttaaggcagaaatataaatgtaaattttgctcattaaaaccataattaatttattgaaagtgaattgttattatttcagggatgaatgcatattggaatatgctgattattttaatgaaccaagagcctcttctgggatacttcccttgtattatttgcaagcaggtcaccgtaaattttctaagagagagaatgaatagattgctgctcattttcaagttttgccttatgaaaaatgcaaaagaggctgggtgctgtggctcacgctgtaatcccatcactttgagaggcccaggcgggcagatcataaggtcaagagatcaagaccatcctgaccaacatggtgaaaccccatctctactaaaaatacaaaaattagctggatgtggtggggcgtgcccatagtcccagctactcggggggccaaggcaggagaatcacttgaacccggagggagtgagccaaggtcatgccactacactccagcctggtaacagagcaagactccatctcaaaaaacaaaaaaaacaaaacaaaaaaaacggaaaagaaaatatgtgctgtatattgggagatgataagacgatatctttgtttaggaaagaaaggcctaacatcatctgttttagactcactattctcctctaggtggccatttcttgcactacagatgtcagctgccgggaccagtttgtgtggtgctgtgcctacacaatgcaggcacattgcaatgtctccaatataattgttatgtttaacatttagagccatttatgtgggtttcctctcctgtgttccactgtattccatttttaatctcctcaagacacacagtagaaaagctgccagaatttgttttttctcttcatatgttatagggtctgaggtttcatctttcatatttccacattgcaggaaagatgagcaatgacatattgaccaaggctgtgaatgaaaatagtgcatacctaaatacttctctttaggtctcatcatcagttccattcattcataatcagcattagtcttctattgctgctgtaacaaattaccacatacttggtatcataaaacaacataaatttattctcttaacgttttggaggccataattctgaagttagtttcactgagctagagtcaagatgtcaactgagctgattccttttgcagactcattgtcattggcttttacttggctgcctatgttcctggctcatggctccttctgccatttttaaagtgcatctctccaatctctgcttccgttgtcacttggccttctctctcagaccttgctttgtctgtttccatcatcacattattgagtgcctactgtctgccaggcactgtgctagatattggagttctatcaatagacaagtcaaacaaggacgctgcttccatgaagattccattcttgtaaacagataaataaaaaagataaaatcaagtaatgataggagtatgaagaaaataaactagagcaatgtgatagaaagatggggctgggaagaatgcctaagatgccaagattcaatctcagcgatgagccagtcacaagaagtcgatttcagacagaaagaactgcaagagctaatcaggcctgaggcaaataaagctttgtaattggagttgaataactaagggagagcgtggcataagccagagtcacagaggaggcggtgaccgagtggatagcgtcacagatcatcgtagggagcttagattttatctaagtgttaaaggaagacatgaaagtgttataagcagagaaacagttaaatatttactgtttaagagattgtctgggctgctgtttaatgactagattctccatgaagggagctatctggccacaccttgcctccctcttaaaaagtatgtttccttactgtggttacatagagcctgaataaaatctaaatcttagtcatgcaggtaattgaaggatgtttccccacatctaaaacttagacctctgcagtaccctgctaaccacaataaaaaaaatgccaattcttcccttttttccaacattttatggatccattagcaatttgcagttcccataggagataaaacaagtctcttttcaaacatgaagagatttcctatggtaattataggcaaaacctggagcaaagggccactaggtaggccaaggaatagggagccagctgagtgatggaatgccatggtcaggactgagaataggccctgaaaagaatagcttggtgaagggacagtgagggtagatcagacagtaggctcccatggacaaacagtcattgcctatcctaacaaatgaaacatcctcattgtagttctcaaaactatgtgcaagtagcatatggtcgtctataaaagcctccttcatactccttgacacccaggtttgaactgatggccatggtagaacctttctcctcgacatccagtggagtaggaatgaggtcattcctggtagtcatcttgtgccctaactgcacaacagtctgacagaatcaccatagacacagcagacatcatctggattagcttgttggaccttctctgatggttgctgagcggcgattgcctaaggcaaatgttggcccagccagtgctgtgtcctcagtgtgcatgcggtagagggaggaagaccagatgatgaggatgctcacctcaggcttggacccctgttaaggaagaccctatcactatccttttggaggtaggaggggaccttagtttgcagacctgacggacaagcctgtggttctttcacctgatactcatgtgtccctggtccttttcatctagcctagtgcagttctaagtacttagtaaatactcaataaatgttggaatcaaaccaaattggctgacatgccccatttcttggcatatgcctggacatgtgagaatattctatatggtttctccagaacaaagtcccatcttaagaagccaaaaatggcaagcctaataagcaccatagaaaatactgtggtttacatatgttcattgcaaccctattcacaatagggttcacgacatggaataatattcacaacatggaatcaacataaatgcccatcagtggtagactggataaagaaaatgtgatacctatacaccgtggaatactctgcagccataaaaaagaacaggatcgtgtcctttgcaaggacatggatggaaatggaggccattatccttagcaaactaacaccagaacagaaaaccaaataccacatattctcacttataagtgggaactaaatgatgagaacacatagaggggaacaacacacactggggccttttggaagatggaggataggaggagggaggggatcaggaaaaatagcttatgggtactaggcttcatacctggatgatggaataatctgtactacaaaggcccataacacagatttatctatttaacaaacctgcacttgtacccctgaacttaaaagtttttaaaaaagaaaatactgtagttgaatacaatatttttgctgacctgtttaaagccttctgcgtgagttggataggagggaaaagactgtaccctctgtgtctttttaaactctctatgatgcagagaacgtgacttttcagaatatgagtgccctatacctttgaactagatggaaacctcaggtatgaagggtctgtgtttatccctgtcctaggtatagtcatggttctatacttaaggtggtttttccgggctctgtggaagtcggtggtacttctagagcttttcatgatcccagagttcatttaatgaagactctatgtaacctggggatgagtgtccagggccttgggaagtgtggcatttagggccaagaaaacaaaggaaatagagcagcacatgctgtgtggacagccgtgatccccatgcttcagcacatttttatgtgagtcggctttgagagataaagatcaaagacttgtccaggagtgcaccagccaggtgtgaaattccaggtgacagaatggaaagaaaagaaaggtttaaagggaaaggaaaggaaatgtagttagtttccttttattctctttatttttcctgtttcctcttcaggaagtttatgtagcttacaataccccagacattcaacagaaggggttgatcctcattcttttccagataatgataagcaccgagggcctgtcgtttagttttcaggtataacccttggcagtccctagggttaaacaatgctgtgctccagaaaattttaatacagaaaacttagtttgctttctgctttggtctgtgctacaaaaagtgggcaaatataaactgggagaatataaataaaataaaggctacttcttgccacttacaaatgtcattagcaataagaataaagcacatcaacaagttacaaattttatccaaccggcagggctcccccaggggcagattcttacagctctttcttcagtgttagtttggccagcagcctagggaacatcatttaatgtcttcaacactaatgacaccttttgtagggggactgtctaggattgttataaaggaattagttgttatcagagaatatcataagcactctgtaggttgttccccgtcacatccccacctctctttggggctaattttctaaggaaagctaaaaatgtttactaagcatttctgagaaacttgtctacattatgagaatagaaattacaggaactcagtgcattagcaatgggaaaggcttaatgggtctgggaaaggtataaatttagggaaaatgtaaattgcaatagttggagagccttcaagggcagttttcttgaaatggcagtgtttagtagcaatggaaagatactcaaggatcttgccatttggcattgtaaaaaatgcaactcgtaggtaggaattgcaaatcccattagtttagaatatgaaatagactcggtgtaaaaaaaaaaaaaaaaaacaacaacatttgatttggggaatgtgcttggttccaggccatgtaggatatggaagtcttttctgtggtcatcccacctagacaaagaaccagttaacttttcaggattctctagaattaggatgttctgagtccacgcctgactctcagaagcttcccaaactctactgccttgacttactttaatgagcatttaggatttagagaaaaagaacatcaacatgccctttgctccatgatctttggcaaaccatggactgtataagcacaatatccacatattggattctgcaaaccatgaagaattcaccgtgttatttgtgtgtgcacagaggaaaacataaacaaagagtcaattaatgacattaaaaaatttgcatgtcagtattatagaatgtcaaatttactgtacagaaatatatgtattatttttttatttatatcaagaaaagtgataaattatcccatcaatctagttcccttacaatgtcagatctggtttaggctgacaagaaaaatgggcggtactgaaggagatcgtttagaaaatattatagacacccagagaggaatgaggcaatggtgaaaaatattaatgcagttaaaatagttttgttgaaaaaatgaaacattgatcacaaagattgcatgtaacattgtattggctgttcagtataataattttaatactactactactaataataataataatagtaaactcacattgttcctgaccaggtacagcttgtagctttaaaactgcattgatagggaaaagctgaagaaactgagcctgttctctggaacaaaggataattatagtgacctaattgtagcttctattacaaaagcagaaatgatagccagacaaattatctctgctgtcaataaagaaagctgtacagcaggtagtttataatctcttttaatgatactacttcttttaccccagagctctccatgaaaaaccttttctgacctcgactaccattaccactatagggagcaaacctcctctttactctctgttcatctctgactctgttgtttgggttcatacagtagcaacaaagagaatttcactgcctacaacttcctagcactggccaagtcagtcagagctatgctattgtggacacattctgcatgagacaaaataaatcaagaaatagtatggaaaagtagcaaaatgttctaaggcttttgaggagtagaaaatatgaaacactaatcaataatcatttaatgaatcataaaatgcaaatgagaaaatcagaaaatatagatgcaatttataccacagataaagtgctaatattgctcctattcaaaggcctttgaaaaatcaagggggaaaatggctagcaatctgatagtaaaatcagcaaaagatatggacagctcacagaagaggaaatgaaaatggcccttaagcatatgaaaagatactcagcatcatataagaagagataggctaattaaaacttcaccgaaatatgacttctcacctatggttatcaaatttcccaaagttcgacaatgcactctgttgatgagactgtagagaaacaggcatcctcttacagtgtaggtggcaatgcaaaataaaagaaatgtggaaggaattttgtcataatctagaaaaaagtatatgtgtgtttctctttgacccagcaatcctgcttctgtgaattcctcccaaagccacagtggtaacaatatggactgacgtttgcacaagatttttcattatgacattatttgcaatagcaaaaaatcagaaatacccaaatgttcgcaaatgcatgactcgttaaataaacaaaagcatgtccacacagtagaatactatgaagcattttaaaaatgagaaagatatctaaagaaattgtagtgtctatgatttctttgctaatatggaatgttcttctgtctattactatgtaaaaaagcaaagtatagaaaaatatggacagtatgctaccttttgtgtaacaaagaaggcatctaaatatataaacatgcttgctttttttaaagaaacaaatatagttatattgcatgggatggagaagacagaaatgaaagctatatattatattttgctatatttaaattttgaaaaatatgccttacatatagcaaattaaataaaaaggaaaaaacaatccctaaaaactgaaaacaaacgaaaataaataacctaactgtgaaacaaattggttgcatagccattcaggaaaaagaattacttcaagtgacattagaatacacgttttgattatacatatttagtgtaatatattctagcaaaaaaatagagcaatgaagacatcttaaactttagtagtcaaactgttagtaattgctgtgatctgaatgtttttttcgccatccccccaactctgttccccacagcaaattcatatgttgaaacctaatcatcagcgtgatagtattaggaggtggggcctttgagaagtgaagtgctcatgaatgggattagcgtccatataaaagtggccccagaggctgggagtgtggctcacacctgtaatcccagcactttgggaggccaaggcaggttgatcgcttgacctcgggagtttgagaccatcctggccaacatggaaaaaaccccatctctacaaaaaattacgaaaattagccagatggtgtgcacctgtagtcccagctactcaggaggctgagatgggaggattgcttgagcccaggaggcagaggttgcagtgagcagagattatgcagtagcattcctgcctgggcaacagaaccagactctgtcacaaaaaataaaataaaataaaaagaggccccagagagctgcctcacctcttctgccatgtgagagatccagcaagaagtcagcaatccatcctggaagaaggccctcaccagaacccaaccatgctggcatcctgttatcagacttcccagcctccagaactttgagaaatccatttctattatttatttataaggcttccagtctattttattatagcagcttgatgggactaagacaataatattgatattatcattttaaaactatatgataaaaataattatatcagtgttaagaatcaagattttgcatttaaaggagggaggaataaatatacaatattaaaattttaaaagtaaaaattctgtaatgttaaatttgaatcagaaatattagtataaacatatgggctttttttcccccagaaatatgtatttcctaactctattcagagaaaaggctgagaaataataataacccagtggcagtgagcacgcctagggcccagattgtggtctctagatatcattccccactaaaaacaaaggggtccttggaggaatgactgcttccaaattaggaatacaagatactcaacataaacctggaactacttatttgtggtaaagcaaggaagcaatcaaaggctaaaggttaagccagaagaacgaaagagctcatacaatgcagtctcttgactaaatatggacaatatgtgcaagaaaaagtataaggaatgcaattgaataaaaatcctaaatatgttattacaaatgtgtattatatattatggacttacataaaaaaccataagtttataattatgttcacaatcccgtattcccccaaaaatgttcctaactactcgtttgtcaccattggaactatctaggacactaactcctgactctgaaaattagcagtgaaaaagaaatatttaagcatttattcagatttcccaatactaagtacatctcaccataatcaaaatgccaaaattgttgaaagattttctttgcagaagaatcccagctaatacatttttaaaatggccttcaaaaatgaccattgtgcaacccctaatgaaataattaattcagtcaaacatcatcagtgaaagaaatgattaaatgaaacattgataggggaactttacaatggagacatcagtttgtctccttagcattactaaagacaatcagatatttaggatggagaagacagagatgaaagctatataactgtactttgttatgttaaatttagaaaaatacacatttttccaaatttttgtgtatgacacaatttgaagcatatgtgcttcctttaaggtatttatattggtttcatagggccgccatttaacagattaccatcaacttggtgcctttactacaaatttgttctcttactgttctggagaccagaagtctgaaatcaaggtgtcagcagagttgcttctttccagaggctttgagagagaatctgttccatcttcttctgtgcttttcttggctgccagcaatcctgggtgtttcttagcttatagacacatggctccaatttctgcctctgccttcacattgccttctctggctcttctcttccgtttatgtcttctcctttataagaacatttgtcatcagatgtagagcctatatggataatccaagataatctcacaacaacatcttaaacttaattacatgtacagagacctgtatccaaataggattgcatcaacagattccagatggatatacaatttccctcgatatataagtgaggggcctgcagaactcacttatatgaaaggtctgccctccatatatgcaggttccttatcccacaagtaccatatttatccgggtttagttgaaagaaagctgtgtataagtgaacccgtgtagttcaaaccctgttgtttaacggtcaactgtctgttttagggagccaccattcaacctaccagagtactcctcctcaaaaatgttgaatctaactaagcctccagatgcactgtccaatatgataaacgttagtcacgttgaaatttaattcatttaaattttaattaaaattttgtaccttagtcatactagccacatttcaagagttcagtatccatgtgtagctagcggctgctgtagtagatagctcggatatggaagatttccatttccatcatcacggaaaatcctattggaaagcactgctctagaagttactcttcataaacaagatatttggggggatggaggaataagttaaatcatttcacaagaaagtaaacagagaaatccagcacatgggaccaactacaggaagatcaacttggtttccgcaataacccaaaggcatggaaaaaataaaaagcaaaaaggaaaaagagtacagttcagtacatttaatgagacttaagagaacaccaaatgtaacgtacaagcatttttacaacctgattcaaataaatcatctggggaagacagacatttttaaggcatttgggaaaatttgtttatggagtattagatgataccaaggaataattgttaatttttaggtgaaataatggcataataaaacattcatgatattttgatatgcctttggaagtatgtagggggatttactttcaaaatgcttggtaaaaaattaatagaaaaatatatttaaaatatgacagaatcttgattttatttatttattcatttagagacagagccttgctctgttgcccaggctgggtgcaatggcacgatcttggctcactgcaacctccaccttccaggttcaagcaattctcgtgcctcagcctcccaagtagctgggattataggcatgtgccaccacaccctgctaattgttgtgtttttagtagagatggggtttcaccatgttggccaggctggtcttgaactcctgacctcaagtgatctgcccatctttgcctcccaaagtgctgggattacaggcatgagccaccatgcccagcccgaaacttgataattattgaatacagaaatgaaacgtatatgggagctcattgtgctattatcctacttttggatatctgaaagttttcattatatcaattttttttttttgagacagagtcttgcactgttgtccaggcttgagtgcagtggcgctatctctgctcaccgcaagctctgcctccccggttcttgccattctcctgcctcagcctcccgagtagctgggactataggcgtctaccaccacgctcagctaattttttgtatttttagtagagacggggtttcactatgttggccaggatggtctcgatctcctgacctcgtgatctgcccacctcggcctcccaaagtcctgggattacagacgtgagccaccgcgactggccacatcaatttttaaaatgtgatcatgtttagattatttataatctaacataaatgaaagaaacattaatgttgaagacaaacacctcaacagaattcaataattcaattcctaccatttagtaaatgttagctgtcaggcaaagtgtgtagcctctctaatctcagctgcttcttctctaaagttaagacttctgtacattatgagaactgttatataatcatgagaaaatatatcactaatattattattgatgtcagttcatctttttaggtagatgaaatactggacaggatgggctcttgtgtgttgcaaacttttctattttgaggcatttgaagggcagtcttaattacagaattttgtttttaaaccagttttatttttagctcatggatccaattgcttcttaccatctccagtgatacacctgtatggacaaccaccaccttccctcacctggcttattgtaataaccccctaactgttctccacagtttttctctcacccagaaatgcccacttcactctgttctcaacaaagcagtcagagagccctttaccatgtaagtcagagcctattacttcactgctcgcaacctctagtttgcttcccacctcactgagagtaaaaaccgaactctaccatggacctccaggccctgtttgccctaagtccctgcttcctctctggcctcctccaaattctcactccctcacactggccttgctgtttttagcacatgcctgcctcaggggctttatatctgctgtctctctacctggaacactcttctcctgttatctgtatagtttaattattttcttcttcttcaagccttttattttatattttcagtagtgcctttcctttaagtaaatttagtgcctttaaataaaattaatttatttaaactttaattaattaaaattttgtaccttggtcatactactcacacttcaagagttcagtatccatgtgtagctagtagctgctgtatttaataatatatatttaataatgtaaactcccttcaaaaactcctactacctcttcctgtttcactttcccctatactacttactaaaaacatattttttcataaagtaccaatttgtaggccagcctttgatgttgacaatacaaatcattcttattgattcataaatacctcctctaaagactagacagcttgttttacatctattacaagtttctgcattcatcattcaaaaaattttggaagtgttttggttgcttgagaaggggtgtgtttgcttaaggaatttaaatattttcccagcaattgtattctgttaatttgttataataactgcttttagataatgcatttaaaagagaattatatataactcaatttataaataatgaatctaaatttgttagtttataaaaggtataagtagtataatcagcatttttgccttttctttttgtgttttctttttaaattgagatataggctgggcacggtggctcatgcctataatcccagcactttgggaggccaaggcaggtggatcacctgaggtcaggagttcgagaccagcctggccaatatggcaaaaccccttctctactaaaagtacaaaattagccaggcatggtgacaggcacctgtaatcccagctacacaggaggctgaggcaggagaatcacctgaacccgggcagtggaggttgcagtgagctgagatcacgccactgcactccagcctgggcaacaagagcaagactctgtgtcaaaaaaaaaaaaaaaaaaaaaggtaaattgaggtataatttacataaagtgaaatgcttagctctttgaaaacagagtaatattctcttttctcttttaatgaatgtatgtcaaattacagaacatttctagcacccatggatgttccctcatactttttcccattcataggtaaaagcctgatctagaattgcttacaaatggaattatatagtatatagtaaatccttttttctgtccaacttctttcactaaggatgataattttaagattcatccctgctgttggctatttttgtagtttatttcttgttattgctgatttatcttctgttgtgtgcataaaccatagtttgattatccattctcctggtgataaacagctgaattttatgtctaatttttgctatgatgaataaagctgctactgaacactcttcgtggatttttggtaaacatatgtcgtcatttcttttttcaattcacctgaggtgaatcactgggtcctaacatcagtgaaagtctagttttgaaagaactcctagaccttttccaaaagggattatgccattttatacttccaccagcagtgtgtgaatgttctggatgctccatatcctttccaacatttgtttttgtcattcttttacactttagtaaggacatctcattgtagttttaatttgcatttccctgatgatgtatgatacatttttcatttgcctattaggcatttctagttattatttattttttcattgaatgataattacttgtttatgtctcccttgatagtaagtcagagactattttttgctagtatatagtataatgtcagtaaaatattgaataaattaatctgtcaaccaaatattagcaggaagaacactcgtgacgcattcaaggagcccgtaatctagttatggaagcagaaggtctagaaaaaatcataaaagttttttaattggttttgttttctacaaagtgacatataacagtttcatattaatagagaatttactggatgtatgagttgaagaggagacaaagaattgttaaggtcattgtggagctgtttatgaataagttaagtccttatgccagagaaaactagagttaaatatttgattaatgggacatgagtaatattaggaaaagcagttgatttaaagagaccaaataaaagttcagtgaacaataatttgaagaaaattgtcataactgagttgacaaagggatcatgagaaatcaagtttacaagaaataaagatgccttttggtacagggtatttaatgttttcaaaaacatttttattcactacaacttgtagttgttaggaaattttttatattttttaagtttttaaaattttcttggggagggtgggatgggggtgagagttgagaaactacctgttgagtattatgttcactatttgcatgatgcgttcactaaaagctcaaactttagcattatgcagtataaccatgtatacccatacctgcacatgtaccccctgtactgaaaattaagttaaatttatttttttaattatcttaaaaatatagaaaatgcaaatagcacataaggtataaaggctacctctaattccactctctagatgcaaccacttaggaattttttgtgtattcttccagacattttctatgtatatgtgaggatatatatcatataaatatttatatgtgtagtaccctcacccttacatacatcatcttctttttagtataggaatagtatgaccctatgttctacagctgcataatacttttctatattcccctgttaatgcatatttagactgtttcccatcttttactattataatagcactttgtgtgtttttctttttgatacctgggatcctttaattataataaagaaatttattccatttacatttattttcataacataaatttggtcaacttatttttttgttactttcttttttactgctatctcttttttattttctgctatatggtaaagagtttattttgtgtatttctctcctgctgaaaatttgggttttagtggtttctttgtaattatatttaatatattcaaacctctgtttcttgatgtatcaattttagacagtaactactgatgcctgctttataaagtgagaaaatgaagaagggtgaaaataaagatagggtactctctcccaaattacttccttattaacttgtgattttcattagttttttctatattttatattatcagagtttataatatttacattttttctgtaattattgttcccacagatatttagtcttagttttatatttaaatgaatgtattgcttacctccagacctgctattccacagcttcaccattatcttagtccatttttgctgctataacaaaaccctgagacagggtaatttataaagacagaaatttattttctcatagttcaagagaccgagaagtctaagatcaaggtgccatcaggttcagtgtctggtgaggccctgttgcccatagatggtgctgcctaggtttcctcatttggcagaagaacagaacaatggaatagcaaagagggaccttagctagtgctctgtagcccatttataagatgttaatcttttcacgatggcttagtcacttcccaaaaggcttagtcacttcccaaaacctcctcttaatactaccacaatggagactgtatatcaacacatgaattttgggagacattaccgccgtagcaaccatgttgaattcttcattttgatgcagttcttagtttgctgttttccattattaataagtttttcaagatgggtcaataagtaccatattccctctatgttttcaaatgtttgagagtgtttttcttttatttgtgttagaggccagcatgagtttgcctgcatttgtcgattacttgattttcctccttgagacagcacttatgcttactatatgcaataagctctaacattttcttttactgtatttaagtatgaccattaaatttatattatcttctacggaagttttttttaattttctttaaaaaaaaatctgtgctaaaatatagtattaaataacatgggcatagtggtctaaggttaccagcagcttcaattctacatgatctctcaaaatacccttttgccagatttgctgggtactctgccctggtggcttcttttctacggttttctgttttgggagagctagtctgagatcagcctacttcttagtgaagtcacctagattactggtcctattttgatgagtctgggttatataactctgctaattctgcctatcagatacaaagcaggttcatacttctcttttctcactacttcacctccatgaagttttttttttttaaggtgggagacctgctcaggggaaatatctctcttctgtctctgcctctcctccattctgaagctggatccccacaaagaattaccgtacaattccagggtcctattcctatccttagactatattaaagtttattgactgtacccctctagactccctccttattttcagtgaaatgtatacatggctggagatgcagccatatatcgactggtggtgcactccgcctttagggctgagtccaagtttcatagcaaggcatgagattatggtcgttttctaattccactgtagatagaattttcttcccaatttctcaagtgtttgttcacatagagtttcagggagggaagtagagtcacttacttgacttcatcatttattatcatctcttattagagatcctcaatctgacagatatgacagaaatactctttaaggaagattattccagagccttttaaggtatatattaaagtgggatgaggtgacataccaaaaactctcagaataatctaggccagtacagtccaatagaacgctctgcaatgatggaattagtctctatttgtgttgtccaatatagtagttactagccacatgtagttactgagcacttgaaatgtggtttgtgaaactgagaaattgatttgatatgaattatttcaaatttaattttatagggccacactcagctaatggccattatattggacggtgcagatctgggcaacataaaagtctgaacattagactgtgatgaaagaaatggaaataaaagaggatacccaagaggtgttatggagaaaagaagcagcaatgttcccatagaggaaaagagaaagaggagatttaaacaattcaaacgcagtttgctcagaagaatggggaaactggtagtaccgtcaaataaaaaagggtatcttttgaaaaataaatattttaacaggttgagttcccagtggtaaggaaacctctaagtggaaatgactataaacaagtaaaattctcaatgaattgggggtgggggtgagggtcaaagctaccaaaaaaaaaatttccttgacacttccgtcttggtctcttctgccaccatacactccttttcagagattaccttgtcctcctcaacatggagggaccctgatatatgacataataatgattgttcagagaaattactattttacctgttgaatgattaatatgaaattagttactgaaacactcactggtgcagagtatcaaagaaacggttttgtttcagaaaggaaaaatataagataaaatattgcttggcacagacgtagtacttttcatctgagattctccacgtactcagcaagtttaattaatgagaaaacctctaagaaggaagtgatgaaataaggaacacagataccagtgttctatttctgtgatttttaaaaatcaagcttagtattttcctcttccattaatgcacacaagtattgccccatgaggcagccatgagatattcatctttctgctgaatgatttctcttgaaggcatctcacttatgagggatagcaaccacacagaatcctaccccctaactttattgatgtcctttgctctatttgcaatggaaatccatccctatcatcagggtgcagcaagcattctctgataatcgagtctgcactgtctctggaaagattgttttgttgcagaatggagcaggttatcttctttatcaaaaattacttaaaacaagcatccatgaatctaggactaacaggcattgaaagggaataggcaaggcccttaacgggtaccctactgtgtaatcttcctttcatcttaattcagaatcccttggaaattcaagttgccgtatgcaaaaatataaattcttctaattacttctgtgtagggcacaggtttggcctaatcaaaagagatatgcaataatatatcctggcatttgttttcatctgttgtaacttgaggataggtgctggggttttgttttggttttggttttggtctcatgccttcttattctttttgttttgttttttgctttttgcttcccaattgaaattgcccaatttcttttctgctccttactcagaaaaataaaaaacaaaaatgttgttctgccaaaagagaaaaatacctcagaaaatcctgcgttctaaagatttttacaaatgatttgatgttttgcaaaataaaactagcttccatgtgcaaaacagctgtttttgttcgaataggggaagatactgatgggtttcagttgtttttttaactcgtcctggcctcccgtatgtctccagtcatatacagatcattcacttctagcccacagccctcttatattctctgggcccaggacatcaagtttgtcccatctattcttgactttctttagccgcctgagccagcatcgtcttatctctcctcttgtacacagtgccccttctttgtccagtgacaaggtttacactcttttctcattagtgctgaagacctcctcacaccatcaagatcaccattgtccagtaagaggctatagtgacctttccattttaatacattactgagaatttagtagagctgatttaacactttccagattaaatgtcaaattctcaaaattcagatggatttggaatccacctaagtatatttttctgcttccattcccagtagactgcacagtggcactgattagcactagcattttgtaatatcacttaaggctttagcactgtggagttctgccagtaatggtgtttaattcacttatatgtgccaattcatctctgtcaggaacctattaatttcttcactattttactctgtccctagcgcctatataatgagacacaataatccccatttgtataaccaaaaaacttagagtctcttgtaaattatccctgatcccactgcttttagtgaccagaaagcctctgtatttctttttcatatttaaatcaattttcacaagttcctttctttagaagaatacacaggaactctagggcactaaattactgaagtcgtagaaaaactagaggattttgatgagtttgttaacatgcatccctgtcccaagaaaggcttctataatatcgaaccaaagatgcactgttcccacaagcacatgccatctgtggggagggaatgtgaatgaaaacagcctctgaagctactatcagcctagtcatcagtgggcaagatatcaaaatacccatagcattgctatcaaagtaaagaccctgtaacaaataaagatcagatatataaaattaatcttcttatgctgttggcatttctgcatgctgtgatcttgagtaaacaggagaatgacagctaagagacgaggaagagttaacataaattcaagagagtatttcattgtattattatatgaaactcacatacatctttgctacctgtactgtatttttcaggattggagcaaaacatcaggagctaagggaaaagcaggcaagaggtcttcttgattatgctactggtgcaattggatcagtgtatgatatggatgatgatgaaatggaccccaattatgccagagtgaaccactttcgggaaccatgcacatcagcaaatgtctttagatctccatctccccctcgagctggaccatttggttaccctcgggatggccatccactgtctccagaaagagaccacttagagggtctctatgccaaggtcaacaagccataccatccactggttccagctgacaggtaataaacttagtgaaagataaatgtagctttaattcagtatgtttcaaatcatctctactgctgaaaccgataaaaaatgtctccttcaatcaattaaaactgaaacgagtcagtaccctagacaagtgccatcctttgaccgacctgtaagatatccaccatcaaaaataaaacaatagccaattgtaaggtggcatgaatgaatagtagtagcagagttcatgatgcaatagggagccatttttgaaggagtattgtgacagacatctcatgaagaaaactttgaacgaatattgtcctttctcctaagagaccaattgtaaaagatttattcaggaagatggcatggcacatggaggtggagagtcagaaaagagaagatgatagcttccaagtaggtgtaattgaagtgggaattacagaaagctgcagaggagcaggggcctttgaaaagtaagatgggggttttgtactcaagggaaaggtgaccctgtatagatattcatggatgatcagaggtagaaaaagaaataatcttggcaataggagtttgatgaagtagagaaagataagaggtgacaagtccacagatctttaggtttagcagctaaggagagagataataggactatctgtcagtacaattgaagtaggtagaaaacaagatgattccaaccccacctcctgccaaaagtaaaatgcttcatgtcttgaaagactgatgtaagagagttttagtcgatatacattgttaggtgacccttggaattacacatgcaaggaatgagttgactgatcttggactaatctgactagcttgacgtctggagggaggtggtggggaagaagggtagcaggcacagagggctctcattctggatgaagaaaagacttgttttccagacttcttagggtcctgacaaccacccagtccctattagtaaccagcctttgtgtgatggcatgatatattgcatatgtttaccatttacatttccccagctgggtgatattatgcactttcaattaggttggggagaggaagggaaatcatggcatttttatgcagactgtaaagtgtagcttcaaaagactgattacctttcagagcctttccaataaccaagtgggaaggaaggagcaatttttaatccttactgtcaggcatccaggttgataatattaaagaaagatggtgaagtttttctttgggacaaaatgaaaatataaatttttatgactgtgatatagccataataactaaactgctaattcaaagaattgattaagagttggatttttctccccagccttcatagaggattgaattttattgtataaataataacaccaggcatgagtctcttctcacccaaaccatagtcaatcttaccttccctaaattagataggtcttcataacaatcctctctgcgtattccacagctagaatcccaacacagagggactgtttataggaacctcttaagccagtattttccaatactaattccatggaaataaatgtgaggcattttataaaaaaggattcacaagtccaatacatatggggaattctaggaattctagggtaagccacaaggaacaggttttccttttttttttttttttttttttttttgagacggagtctcactctgtcgaccaggctggagtgcagtggtacgatcgcggctaaccgcaacctctgcctcctagttttgagcgtttctcctgcctcagcctcccgagtgagtagctgggattacagatgcctgcaaccacggctggctaatttttgaatttttagtagagacagggtttcactgtcttaaccaggctggtcttgaactcctgacctcatgatccacccacctcggcatcccaaagtgctgggatttgaggcataagccgccgggcctgggaagaacgggttttcttattgcagtctttttatgcctaatatgctgacatgcattctgagtttctaagaggaccatccaacaaccagcatgcatcatcccccaaatttttgtcacctaaagcatatgtttcccccagatctttggaacactatttaggaaactctactaactaatctatgtcgacgtgaccagaaaataagtttcttatgataatcttaactgcagccactataaaatgatatttaaaaaattattgactgcccagtccagacatatgtgtaaaagagtgttacttttggctctgacccctttatattaaaagtgatctaaagctgctttcaatagagttttcaccgctgtcctatttttggatagcagatcaaaatgtgactctttatactcagaattatctttatcctgctcttatctttaattatgcttaaagactgccctgctccttgttcttcaagtcttcaagcaagccgattttgtcctggcacatagtaagcattcactaatgttaggtattatcatcatcattgttactattattattactctcctttttcaatgaaaatctgaacttccctgatatgcctgtgcccagataagtctaagaagagttgctatggcagtttccctaatagtatccgtaagcaggaacctacaaattctaaacataccatacgtactgttagagggcaatgccattcatccattcatcttttcattccttcactcatttagtaagtatgtatttgacacctaatgtgttccaactactatagaaagctttagggaagatagagagatgattaagaaacagtcccaggccagaagaggtcataatctagtgaatagaggaccaacacatgtagaaatggatcattgcattgtcttgtaaatagaaggaaaagaagtttttcctttctaactctgcctaagctagtcaggaaagtcctccaaacagaggtgatatttgaactggctctagaaggcttagtaagacaggagcaattgcagtggaagaattgttttctttgcagaataattaagcatgcacaagagcaaagtggcctgaaagagcaggcctgttaggggagctcagaagcacccagacacggagcatgggtgggaaggaaagtgataggaaaagtggctgcaaagcaggctggggtcagtttgtgatttaatgggttgtatcttaggctgctacttattgattggtagtggctgtccagaaatctgtgttaatgaaggtcctgaggcaaggcacagtataatcccagcactttgggagtccggggtaagggggaatcacttgaggccaggagttggagaccagcctgagcaatatagcaagaccccatctctataaaatattgttctttctttttttgtgtgtttgagtctcactctgtcacccaggctggagtgcagtggcatgatgtcagctcactgcaacctctgccttctgggttcaagtgattctcatgtctccacttcccaagtagctgggactaccggcacaagccaccaacccgactaattttttgtatttttagtagagacggggttttgccacgttgaccaggctggtctcaaactcctgacttcaggtgatctgccccccttggcctcccaaaatgctgggattacaggcatgagccaccatacccggcctctacaaaagttttttttttaactatccaggtgtggtggtatgcacctgtagtccaacctactcaggaggctgaggtgggaggatggcttgagcccaggagtccaaggctgtagtgacctgttgattgtaccactgtactccaccctgggtgacagagaaagatcctgtctcaaaacaaaaaagaaaggttctgaagttatgcctgaataagggtatttttcctggactccagaatgatgcgtggtagcaagtgtgtagtgggttttgatgtatttgccaatcccgtagacaatgggagccactgaagcgtcataattggggaatgagctgatggatttgtgttttgggaaaatagctcttccaacttgatggcagacaaagaagaagatggttagactaagagacagagtaagagatgattacagtagtaaatgaggacaggagcttgaaataagagagtggcattggagacaggagagtataagaagcagcccaaaactttaacttaaaacaaagacaaagatgtttagcagatatcacagacatgaggctttcaaatgcttcagagagctcagtggaataaggactaaaaagagggctttagatttggccactaaaaggtcatcagttaatttagagagaacagttttagtagctaagtaggaccagagggagaattataatgagaagagaattgattaagaggtgagaacttaaggagtgagctcttggtgacaaagagagagcagagttatagaatggaaaagttgcagctttgaagttccttctgtgacagtatttcagagctaacaagagaattcagagactgtctagagtgaccttctcatatgattactgcagaaactggggcccagagaagatgagtgacttgcccaaggtcacacagcatggaatcaggactttatcctagatctctgtgttctacagtcttcttttccctaccccacactatgatatagacccacactctcatttcctgcttgacgaatgtattagtccattctcgcactgctataatgagatacctgtgactgggtaatttacaaagaaaagaggtttaattggctcacagttctgcaggctgtccaggaagcatgatgctggcatcagctcagcttctcaggaggcatccacaaactttcaatcgtggcagaaggcaaaggggaagcaggcaggtcttacatggcaggggcaggagcaagacagagaggagggaggtgctacacacttctaaacggccggatctcacgagaactcactcaccattacaaaaacagtaccagtggggaaatccacccccatgatccaatcatctcccaccaggccccacttccaacactggggattacaatttgacatgaaatttaggcagggacacagatccaaaccatattaaggaaattagtacctggataagtaaagaagcatccatctgggctcccaacatataatggcagattaaatcatgggtatgggaatgaagctgatatgggtccagtccacttccaaatactgctgcatgagctgcatgacttatccaagatgccattttttattttcatgcatttaattcaacaaatacttattgagtatccactaagggtcagggcctgagttcagtactggactcaccagggaactgggaggaagatgactatgctgccttcattatggatattaggatccaatggcaatacaaagacctaaacatgcagtgagaacacagtgtggaaagtgcagccgaagagtaagtgcagggtactgtttggggccaggcagcaagggtgaaaacagaggggagaggaagcatgatgtgttagggggactgaaagactctcagtaaaatagaaacctggtgggaggggtaaatggaaagagagaacatgggatggcctcagagctgaccaaaggcagatgagagaggttggccggccttgacgaagagtttggactctatcctgagggaggtggggcagggtttgggttggagaagagctcgctgaggggaagaactcactgagggttttaacgtgagatataatcctggaattcaataggctgtttaatagcataggcggtttatcctcatctacttatttgtaaaagggaagattataatatagccttgcatcctgtgatggttaaatatgattttacattttgcatttttttctatctccatatgaaacataccctatttgtccatatatctctgtcacataggaacagatcgtgtgtatgtggtccatagtagctttctaatagaggcgacttcggtctcatacctacttgcttctcaaaggttggccctgaaccttcagtccatcttagaaaaaaaaaattgccttataaaagattcatctataaatgacagtggttaaaaaaaaatttctaccaccaggacagagacacgtgactggattttcacaatgctggttcttccaggatttgaacgtagcatgggttaaatcctgccctcaaagcctgacaattactcaggtttacaatgtgttagttttccaccgcaatgccagcattgaaagggctcccagagtgtatgaacatgaaaactttatgtctggatgaggacaaaacagttccaaatagggggctagaaggtatatgtggcacacagcacaaatgcagttttgcattagtttgtgtgacaatttgacattcatttctagaggttgccaaatgggtttgattgcacacagtatcagtaaaagaaaaaaattgctttcgggtgttaacctctaaaaatatgggcatttgtttctaactgatatatactaatttaccctactaatatattacatagaagacatataccaaatagagaaattaattttaaaatgagactttaacaaattgtaacatgagtagtggttctgatattttcttcctccctcaaatggggtttatacagcccattttggagaccactggtctcagcttcaggcttcagggtggtagggacctatcctgcttttgctcacctgtctcctcagttcctggggcagtctgtcctcaataaatatttttggaataatgaatgaatggtttaacaggatctttcttttttttcttgagatggagcttcactcttgttgcccaggctggagtgcaatggcacgatcttggctcactgcaacctccacctcctggattcaagcgattcccttgcctcagcctcccgagtagctgggattacccatgtgtaccaccaaacccagctaattttttgtatttttagtagagacggggtttcaccattttggccaggctggtcttgaactcctgacctcatgatctgcccacctgggcctcccaaagtgctaggattatgggcgtgagccaccgcacccggctgatttaacagtatcttaaagttggctagcaccttcagtggtcaagcctcacgtcccactcatcagaggcatcttctccatgaactgcctcatgaatgtcacctaactcacattggcatacttcagtgacaaaattcatgaggcatcctttttcttttagatcactctagttgatgtagaaatgcccactttttacccacccaaacactgtctccgtgtagcttttaccagggatcttgggttgagctacctggacacagcatctaagcctcattaacagccttttaggtatttaaagtgactgctatgaccaccttcactaacaaacatttatgaactctaaacatatggccaggctctgtgcttagcactggccttaagaaggatgtagaaaacacagcaaatgaccttgagaagtttcttgtataatcatttcttcggcataaactcccccagctgttttagccccttcttaaattataattcacaccttcagccctcttggcagccatttggggaatgtgtacactaaagtctattgagtttatgattgctttgttgggcatggcatgcagaactgggtaccatatttcagatatggtcagaaaatcacagaagtcagtgggactctgggtatcctttgattttaatcctttacacttattaatgtggcctaagcttttatgtccattgtcattattagcttatattgcactttttaactaaatgtttggtttttttcacttaagttgctatcaaacaagattccccaataaatttacaaaatcctttattggtacaataactttttaaaatgtgggatagtctctttatccaagttgaatatttacttgttagggttagcccattgttgtagccaataaagatattttaaagtatggatttttgtactccaatgtatttgttattccctagattttaccagcctcatatttaatcattgtgggctcctccatgtcattgataagatcgttgatcaatgtcaaatacaatcccagcactcatcactcgagacctccattaatcaacactctttgggatcttcagttagctattaatctagtctgctattatctagtctgcattttccagttcatctgaacttatcttagtgataacgaggtacaccatgtttgtgaaaatccattgatttaccactctggtaaccctaacaagaaaaggaattacggttgggtgccgtggctcaagcctgtaatcccagcactttgggaggccgaggcgggtagatcacctgaggtcaggagttcgagaccagcctgaccaacatggagaaaccccatctctactaaaaatacaaaattagctgggcgtggtggcccatgcctgtaatcccagctacttgggaggctgaggcaggagaatcacttgaacccgggaggcgcaggttgcagtcagccaagattgtgccattgcactccagcctgggcaacaagagcgaaactccatctcaaaaaaaaaaaaaaaaaaaaagtgtgggaaactatttgctcttgatgaatcttagagaccgcttttttttttgttgtttggagacagggtttccctcttgttgcccaggctagaatgcagtggcgcgatctcagctcactgctacctccacctcccaggttcaagtgattctcctgcctcagcctcccgagtagctgggattacaggtgcccgccaccacgcccagctaattttttgtatttttagtagaggcagggtttcatcgtgttggccaggctggtctcgaactcctgacctcaggtgatccacccgcctaggcctcccaaagcgctgggattacaggcataagccaccgcgcctggccccctttatttttcctctttctaattttcgtaaataatgtgtccatttagacttaattatgcaaaataacactttctgtgagctgatgtaataccaggcacttagaggcacttagtatttgcttactaaatacttacttagtaactgatatatggcagctgtaaaattgaagtggcagacagcgcacagctcctgaatgctccagttaagcagcttttgttttccagcatgtatccactaattttgcagaaaacttttattgagcatctgttgtgttccagaggtcacacaaagaagtttagaagcaatctgactctcaaggaactcagtctgatagccaaaactatctcataaacaaataattacaatataatatgttccattagaatagaggtgtatgtgggatatgttgtaaaaatcatgaaattgttaagtgcattcagtgtgagaaagacctgagactatagatttatctttccagggccttggttcaaatgtattaatttttcaaagcctgatttctcactgtaaaatgaagacatgagtatatctgctcttgtctggtttattcgtggattaaatgaaatcatttcagtgttaggctcaataaatgtcaactatatttaggaagattattggactatatattatcagactgtattacatattattggtatatatattgagaagattattgaactaaatataactattgaggaaggttattgattgtatctagctgttgaccatttaaaataataggtttgggaacctgttggagtccatctgttccagggtcccatatttagtggttaattcctagctccagcctcaactcctgccagtgtattgcaatcatcagaaagaaaaagtagaaacagaaaagcaagtgaggagatgaaaggcaagaaaacttaaaaaatttaagtgcagattctttttttttttttttttttttttttgaggtggagtctcgcactgttgcctgggctggagtgcaatggcatgatctcggctcactgcaacctccgcctcccaggttcaagtaattctcctgcctcagcctcctgagtagctgggattacaggcgcctgccaccacatccggctaatttttttgtatttttagcagagacagggtttcattatgttggccaggctggtctcgaactcctgacctcaggtgatccgcccgcctcggcctcccaaagtgctgggattacaggcatgagccactgcacccagcccaacaggcagattctgttagatcagtcatatcatctgcataagtgaagagagcattcattacacactgagctactttggcaattgtttgttacaaaccataactcattagatatccctaagctcatcatcggaactgaggcaatatcctaccatgtcacttgattgtccatttggttctgagtcaggcttaacaatcatccacagaacagactagtccaatttctatgggtcccagaagagctgtcaataacaacagtgtcaagtcagatcctgtttgactgtaaacaacagaaaactcagctgatacacatgtgtctcgcccattaaggaatttagatggccttttttcctcttcctctcttgcctttcccagtggcaaagcctcttcttcatgttgcatcatgattccaagatggccgtagccactctaagtttcatgtccaccttccagggagaaaggagaaaggggcaaatggccaatggaatgtgctagtcaagttcatccctttgaaaagattccccagtagactccaacaacttctcattggcaaaaaatgtattaaaagatttactctagtggcaaaaaggtgttgaaaatagaatttcaactttccagtaaacaaagtcaagagagaagtgagtagtgagtggcttttagggcgacactctatggaatccaccacaaatagattacctttagatgtcttttctcttttttttcagttccctttaataatgcaaaagttatagattcatagtatatagtactttcgtcaaatatattcttattaactccctgtgagaggctatccttattatgtagaccctcttttatagctaaggcagaaatatttcagcctgaacaacttgttttacattttttatttttaatttttgtgattatgtaataggtatatatatatatatatatatgtatttatgggatgcatgagatattttgatacaggcatacaatgcataataatcacatcatggaaaatgggatctccatcccttaagcatttaccctttgtgttgcaaacaatccaattatactcttttaggtatttttaaatgtacaattaaattaatattgactagagtcaccctgttgtgctatcaaatactaggtcttgcttattctttctaactatttctttgtacccattaaccatccccacctcccttccaccgctctgtctaaataactcctagaggcaactgggggacatacattcctaattttcatgaccactgaaaaagcatgtgctttgggaatgctaaaataagggcaatgagggatagaaaaagcattaacaggaagctttgtagctgtgtgaacagctggatgtgaacatatcttgtatcactggggcaatgtaggatagttgatatctctttgtcacgacagtttgttaatttcagagattcagcatttcattgagccatagcattgtcatgtacagctcatacctctgttggtgtttgtccccagtctctttctctctagtgagttttccagttaattttattttagtttaatagcattttgtctgtcacctctgactcatgacttcgtgtggctgtgtgtagggacttgaacagtgaatacagtagattacttagagatttgtttttagtttttacaagtgaacaaaagtgatcacatttcaatgtgggaatcccagtgataaatgccatttccgtagagagttaactcatcaattgaacaaagcaatcagattttttttcttagaacatattaccatcaatttttaagtgacttttaaacaataatgagaaatctcttaatgaaagaatctctgtgaccagataaatgctaatagtaactgatataccattaactctactttcctccatcccatctctttaaaacttgatgttctcattaatttttttcccgtcgtctgagagccctacccttgggactatactagttatatctgcctaaattgtcagtgtccaggggtgacagatgtagacaatctcctcctttattatgcatgagctaggcaaagagggtttgtactcagtgaccatccattttcaaggccccttccccccatcctcaaccactgggggtaaatgggcatgtttgaggaatgtttgccaaagggttaccctgatttattaaagctgtcatttaagcatttaagcattgaccgggatgcttttcaaacaaatgacctgatccttaggatatattcatctaactaattctgtttactaagaagaggttggaaggtatatgcagaatttcttcacttcgacataaaataacacaaagagaatggcacagaacccagagtttcttgccctccagagagatgcagctgacaatctggaataataacagtgttatgctatgatatgataagggtgagccagagatgcttgaatgcagatctggctccttgaaggaatccatattatgacctaaagaagaactagaaactgagtgggtataagggcatgcacaaaggcccacagagaaaacatggtacgtttaggaaaccacatatattagaagagctggagtgtagagtgtaagtcagggccagctggaggccagagatgaaagttagcacaggccatgttgttaaaggccagataatctaagataaaacatttagactttagcccaaggcaatggggaacgcttaaagtagggttggcatgttcagatgtgtgctttagaaagatgacagaaatcctgtggagtaggaatctatttcaccgatgaaaaactagaggctctgagaaattatgaaacttacctatggtgacacagataataagtcggcagagctaaggtttcaacccaagtcttactccaaaactcatgcatgagcttccagccatgctaaggtttttcaaacttcatgttacaccctattagtacctcttaaaatcaatgtagtgtgatcaatgaatatttgttaatagaatataaaggaaaaagaaagagcattacatatactgtaagtaattaagcattgttttgtatttttgttgcagttgtacatgtatgtaaaatgtggacatagggtatgtgtatagctgagtattggcacatgatgcaaaatgcatttctcagagtagattgcagtcaaaaatgttggaaactactaagcatgtgcaaatagcatgcatgctgctgctgacctgccagatatttctcccttcctccctttctccctcatttattcattcattaactgattcattcatcccattaaaaaaattatatgtatgttttgtgcaaagcaccctactcaaggctgcggggtacaaaagtatatcagaagccttgggctttgacctacttctctgtagtagtgctagatttgtgtggatctgccacacttactccaggcctcttgtgacctgtgctttgcattaatctcttaggctaagccacataccttttcattatacaatctttgctgatgctaaggacagattccaaagtgccctccttataatttttgtatttaatgcaaagtgtaatcaagaataggccattgttaggtcaattgcttttctgtatttatcttttcaaacaataaataatcagtgggatgaaaaagggccggaaaagatagttttaatggtatactcataattatccaacattttaaggagacgttttaatatttatatgctgtgaaatatcctctcttctggaaagctgactgaggattggtatgaacccatccagaaatggaattcaggagccattgttttgcacagacttcagtcaatcctgagcaagcactctggattttcccaaacttggccgttactcagcctctcactctccaaattgtcaagacttctgtataccacactaagaaggatattctcttccatgtagatgcagaagattttctatgtcaagttcagtagggggcctaggctcaagccatgctcattcttagaggaaaacctgacaggatatccatatactatgccctctactgatttattcacgaaaaaccaagccccaaaaatgccagtcaggtcacacgcacacttaacaccaagagcttaaggtgtagtcacatcttacagggaaggttagtctttaaagtcaaacacaagataagaatagctcacagtcaaaattacccttgaaaatcccttaaactaccctttaagcaaagtgtgtatgatattatatacaacatttatattaattagtatttatttacactgtggtttaagagccaggagatagaacaaaggaagacaataaaggaaaatctgtatagaagagacagcttagcagttaaggccatagattctaaagccaaaccttcttgatttaaaacctggctctgccactcagtatagttgtgtggctttgcggaaattattaccatctctctggctcagtttccacatctgtaaaatgagcataatcgtagtacctacatcagagtgttattacaaggatttgcattaatctcttaggctaagccacataccttttcattatacaatctttgctgatgctaagaacagattccaaaggacagattacatatatgagttcatatatgtaaacagaaaaacagcagctggcagttaataagcaccatttaagtttaagctaatgtaatatatgctgatatgtgagcatttacaccattttgtcattaagattgcgattcattccctgttagtgaactttgaagttgggtagggaattacaaaatgttcttaattctcaactttagtagattttttttttccatttggatgacagttcttatcaaataacttcatatatttgtctttacattttctgtaaccatatagttataattattatatagtcatagttatatatagttatatagttatttttaactttttattttgaaatttttctagagtcagaagttgcagataaaatattgagaagttccttgtacccttcacccaattttctccagtggttacatcttacataatcgtagtacaatatcaaaaccaggaatttgacattggtacaatgcatgtgcatagttctgtgccattttgtcacacaggtagatccacgtaaccatttttgcagtcaagatatagaactattttcatcaccacaaagacatccctcatactactcctttacagtcacacatctttccccatccctaactcttggcaatccctcatctgttttctgtccataattctgtcatttctagaatgttacctaaatggaatcacataaatggggtagcatgtgaccttttgaagcatgtggcttttttcacaccctggagatccatccaagttttgtgggtatcactagttcatttcttcttacttctgagtagtaacccatgtatggatgcactatttgcttaatcatattggatatggttaacccatggtatggatgtaccattgcttaatcatgctatggatgtaccatttgcttaatcattcatctgttcctggatattttggttgtttccagtttatggctattacaaacagagttgctataaacagtcacctacatgcttttgtgtgaacatatgttgtatgtcttccattcttatctgtatgctttttatttccttttcttgcctcattgtgctggctagaacctccagtactatgttgagccacagtggtaaaaatgaactttcttgacattttcctgaaagaaaacattccttctcactgttgagtgtactgttagctataagttttttgtagctgtctttatcaagttgaagaagtttctcttcattcctggttttctgagaggttttatcataaatgagcatgaattttgtcaaatgctttttccacttcagttcatatgatcttgtgatttttttttgtttaggctgttaacatgttggtttacattgatcacttttcaaacattgaacctgccttgcatttctagaataaaactaatttattatagtatataattatttctagtcatagtatataattaaatgtagtcatagtatgtaactattttatatatttttaattgtattaaatataatcatttaataaatactcagttaaatataatttaataaatattaaattgaataatcaatttaatattgtattatgaaataatttatcataaatttaataaatttaataaatcgtttaataattatatatatttaattcatttgctaatatttattgctgtcttcattgaatgtgtaaggaaagtattacctccccttctttttctggaaaggattgtgtagaactcatgttaatttttctttaaacatttgttagaattttccagtgaaatcatctgggcctggagagttcttttttatgaggtttttaattatgaattcaatgtccttgataactgtaacgctattcaaattatatcatgttgtatgagttgtgggagtgtttacttttctaggagttggtccattttaagttatcaaatgtatgtgtgtagaattgtttgttgtattcccttattttcctattgatctgatattgttagtatcttattgatctgcatattctgtagtgatatcctctgtttcattcctgatatttataatttttattttctcctttttttgtcaatcttgtagattttaggctatgttttcatgtatcttaaatctacagatgttttgagccaaacaatacactgtaattactgtttatatggtaagcatttattttaactgttgctttttctctttgttcctttctgaatatctgtgtttcccagaatacttttccttttttccttaattatttcctttagtatttttgtaatgtggcaaattctctgtttttatttgttttaaaacagttttatttcatctttatttttaaggatattttctctaggtatgtaattgccagtgatttttttcttcttttaatatattaaagatatcattccattgttttctaactttcaatgtttttatcaaagtttgttgtcagacaacttactcctttgaagatacaggttgaacattccaaatctgaaaatccataatcctaaattttctgaaatctgaaactttttgagcactgacattatgttcaaatgaaatgctcattggagcactttggattttggatttttagatttggaatgctcaaacaataagtatataatgcaaatattctaaaatccaaacacatccaaaatccagaacacttctggtcccagacttttcagataagggatactcaacctgtaatgtatcatttttctttgactgccttaaattttttcctttttgtcttggttttcagcagttttactgtgatgtgtctgtgagcgtgtgttggcagggaggtatgtttaaacctgattaggatttgcagagcttcttaaatctgtgctttagtgttcttcatcatctttgaaaaattctcagctggtcacacctcttcagaattgtttctgttccctcctgctcctcttcctctcctcttcttcctcttgtcttcctcctcgtcttccattttcttctgtctttctctctctctcccttccttctgggatccaataaagcaaaaatatttgacctttctgtacatgcgtcttgctctctgttcgtttctggttttctctctgtgatgcagtctggtttttgagttctctgtcttctgatttactactcttgcctgtgtgctgtgtccagtcttctattaaacccttctgttgagcacttaattttagttattgtaattttcagttttaggtgtctatttgtttgttttaccctgagatgctacttctctgatgaaattctccatcatattatcttttttcttgaataaattaattgcagttattttaagaaccatgtctaataatgtcactatctgaataatgtcactatctgaactgtgggtctgttcatattgtttgattttcttcttcactttagtcatttggtcttatctcctggtatgcatatttttgatcaaatgctagacacagtccttgaaaagctgtagaaatctcaggctgatgatacctttcttcagagaagatgtatttaataatatgtcccattaagggacacattgccttaatgcagtctttgattgagatcactagaagctggattttagttatgtgaggggtagtgtattagtttactcttactcctagagggtaacctttctgtgattctaactgagagtctgtgttgtttacgagtcccttcttccttagcaggttctcaactccaattcctatcttcccatccctgtgagaatgtcagaatctctgctcagcctccaagtctctttgccactgcactctgctcattttcttagcatttgattctgtgccacttgtgaattagcaaatgacttggagagaaaaaacgccacagaatattgggctcagttcagtgtgcttacctacctaccttttagaatcagtcttggcctcccaagtcctagctgtcttgggagttctccaatgccttcaagtagtttttaggtttccttttttttaagcttatccagcttttttgattattctcatgagagtaagaatgcaacaaattcttccaccatcgccaaaaatagaaacccttatcttttttttaatgttaagtgttgacaacaatatatggttaacagacttcgttgttagaaggataaaaagaaattaatatatatgaaagtaacatgaatagggcctggtacatgatagacacttttaaattactttcaatttgaatttgaatatacagtgattttggaaacactgaaaaggttagtgattagcattacatttttgcctgttgatctttcttgttgaggccctacagtcactgttgtgctcctgggccttggtcttatgaaccttccatcagtcacattcctgaaggctgcctcttcccatcagtctccctctcagagacctgttggccctcctcaccatttcagtgaccacgtttagcaacaggaaggatgggtttgcttccttctctcgtggctcatgtctcagtgttcaccacagaaaatagctaatctggtggtggtcaacttcagacctttgtctcgtttgttttcctgaatgtttgccactgctttgcactcactgcagccttgttccagcttctttctcctggcagtgaggccagtgttggtgaaagatggcatggatcttacaaatttgtacttatgtgagtgaaaactgagaaatgccgagaaagacaggcagaactagatctaagtgtttcagaaactaggaacattacagtaccagaagacttggatgtgcttaattccagtttagaatctggaaaacaacttttttgagtctctgcaatttccaagtctcaaaactaattcactagaaaacatttaaaatgtaaagcaatagacttcagtagtaattttcagatcatttgagtctaaatgcagctttgaggatatgcagttcgtaaatttcctactgggtcattttttttctgagagggtatttctctaaactatatcagataaaggatgcccagaatttgctcagatgtgagtttcaggatctagaaacacaatatgaggattatcaagactaaggatgttgatagtgatgatgatgatgatgatgatgatgatgatgatgatgatgatagtcaatagtagtatttattgtatatttaatatatgcccagcattgaggtactttacatgcaatatgatgtctcttgagcaacatttaactttctattgattacttctcttgaggttatcatctttctcctagtggtcattaacatagagtttgaagctgggcataaatcctaggtataaatcctaactccacagctgctgtgatctttgtccatacaatgtaacatctttgagcctctctttgcctccagaatgaaggtgataccgtatctcataaaattcacagaggcctgaatgagttaatgcatggcaaacctgaagcacagtgactggttcttcctattgtgtgatcagcaagttgtagccatttttttcctcacttttctaccactattggttgaagtgccctttatttgacccgtcaaatagaggatctggagaataaaaaaatctaacaatgtaagaagaggaggctacagaaaccactgatgatgtattctgtaccagcttagcctccagtccagggcttaggaaacaaggttctttaacagtcatttgatttccataacattcattaaattaatgaatctccattcaacagatatttattgagtgagatttagacacagtccttactttcatggaacttaagacctacaggaggagacaaatattaaatgtgtagttataagtagagtgtcataaacatatttgacactgtggaggatcaagaaagaagtcactgagaaagcgacatttaagtcgagactcaaagagtgagtagccatgagaatttgggtgctgaaagaggcatgaaaggcactctgggcagaggagcagcatgggggatgccctgatgtggaaaggaacttggcatgtgtgaagaagtgaaagaaggtcctcttaccaacaccaagcaagaggataaagagcagaggcttagtaaatggatgagtcagtctgcctggcgcctttcttcccttcattgaaccaagaggtattccctagcacggactgccatgtagaaaaggtcccctattatttcagcaccacatttcagcttacccatggttctccagctgtccagggacatgcaccctctacctcccagagacctaacctatttccctatcacttattttcagggctatgaggtgccttattaatgtgataaatgtttgctccttggtcaacttttagtggtcctagataattgttctcaaatttgagcacgcatcagaatcacctggagaacttgttaaaccacagaaaccttggactgcacccacagagtttctgattcaataggtctggggtgggaccctacaatttgcatttctaacaagctgccgaatgatactcatgctgctggcctgggttctgtcggtggtgaatcattagtttaaggtgtctttcttctttcagcagtttaatagtcatcatcagttccttaactgaaagagaaatgctcaggcagggcttaaaggaagaaatactaaaatcaaaagtagactttatgagtaagtgtgacaatggcctaatggaatggacttctttgtaagcatgacttaccttatacatctgtgttcccagtgcttagcacatagcgggtaccaaatacatatttgaaggaatcacataatggatctagcttagtgactaaagaaatgggttttgtgcattagtctttggaaagctctcatgattcctttcaggttgaaagacgttctgggagaataaattattgtcattctcttggaatacagccctagaaattgcagagtcaagatatgcttgtattttaagtacttacttggattaaaagccaaattgctaacaggattacaaaatgccaagtttgctgagtctcaaattgtttatgcgcatgtttggttcaaatttctttcatcaatcagtacatttctgtttctaattacagtcttaatgttttttttgacacctgcacatgcattcttagtctaaaccagcttcagtaatttgcacagatataatataactgaaatgaggctcttaaccaccagtgtgtcacctataccacgtgtctgaggaattcagaggtgctgcacctcagttcacattgtgattttgaaaacagcctgctatttttcccattttcatgcccacaatgttgtaaacattttaataaacactaacacttttcctcattccaggcacatggagttctagtagatgatgcaacatgattttcgttgtgattttttatttatgtttattcttggaatctctgtacttggataaaagaagaagacagatgaccaagattaccataattgtccagaatataatgtatgcaatctggaagtttattactaccaccgatcaaattgattgcagactcttagtctagtcccagaagtttggggctggttttgatgtgagccattcatcaaatctcagacgtgactcacgcagtggctcatgggtcaaagccttccacgtattgtaatgaaccaacctgaacaattctgtacccagtttttagtttggattgtgcccctatctgacacctgtaaaattgtgagttccctgtgggctctaataatcagagtcctagttagagaaaaagtcatctcagcatcaactgacaattattttttttgccctcaatatccttccctgcccccttatttggtttgaactgactcacctaattggggtcaaccactgaaaaaaaatgtgttgctgattttgtcatttctgaatgcctagaactaaggaatatcttggcaatgacattgcttagtcttccttacacataaggagagtttgaacaatggatccaaattatcattgcaagagtgcactcagttaggggaactcagctgaggtgaggaacacgtccacgagtttcccctgtgggcatccagagtagccatggcctggccaggcactgccttgcggcccttccaaaggtggcagaatgatgttagtgttaacatttcactgcacattaattctttaaaaaaaaaaaaaaaaaaaaacctgtcatttaattttaaatgctaatatgcatatggttaattaagaagccaaaattggctataagctcagtgagctctgagaacggggagagagatcattacacttctgctcatggttagctatttgtgaaccaactgataatgtgcaaaattaagatttcgtaagtggcattttaaatgaatggttaatggctgaagattaattaaacagtcagagttgctgaagaaaagctgttaaaaattatgtttataggccagtcacttgcacgctgagactgaaatcctgaaagattgtggcctgtttactgggagagcattttaacaaagcagcctcctcgaggaaggaaagccagccacccttccccacataccatgcagctgttgcagtagccttagggactttgctttggagtaaaagcagccgagtaggaaaatggactagaaaagtgttttattgaagggatcttcactaaaaccttcatcccaggtaaccaggcagattttatttcctacctgcctgccacagagttctgagttagagtagtcagaacccatgggatttttaagaaagtactccataattctctaaaagagacaaagaattgcagtatattgttttcaacctgtagtggatacttcttaagtctgaaactgccagccctcttggtggtggaaacatggattctgtacatctggctctatcctaggttggttccttggaaaaaggtttgcctttgtatttaccactgtgcattgtgcataggaggtaccatactgtaaaaatagttgtaaaatttgttgtcagagcttacctgaataaatattggataaatcaatgaatgaatgagctacctaaaagttggttagtagactaggaaacgctctttttaaattcctttccatccatccaacaaatgaccaccctacttctctcgtagactgggtattaatgtgtggtctcagcctctgggaccacacaatctagtgggggagtcacaggcctgtcaacaagtaagttgcagccacagttaagcacagctagagcagccagagaggggggttaggaatctttgggtgcagggtagtcagaagtatattttgctatcacttgtaaggaagtttattctacctattgaaaaaatattagcatttatggaaaggctcttcactaaaacctttctctaaaattatatttcattaagaatatacactagtaaatatggtagttcattcagttcaatctcctgcttctaggcagaagacccaaatcacacaggccagatagttgtgtctgttgtttaaaagttccctaggaatggagatcctgcagcctcccttggtggcctgttgcagggtttaatcacccttctaatcaaggagttaatcctatttcctcttctctacccttctttgggttagtggaacctgtaaaaacacccatgagacccctcggaagccttaaggaattagtgagtcaacactgggctactctgggttcagcagtgtgcctggtaatggtgagactctgtactgcacgataacaatgacatgacttcgttacatctcaaatcaaaagttttcttcctggtctaaagaaaggaagagttgtttatgttagcatgttttagatgttgttttattacattttaatctatatgtttagttaattacacgtttgacctaatgtcatataactcagaagccaaattgcagtgttttgatttaaaatgaaatcagtaattattaaaaacaactaacactaaatagtgagaatccactattgctagacacttgctaattactttgcatgtgtcatttaatcctcctgacaatctgatctagtggtactattagtattcccaaggtacaaacgaggatattgagttgtagagagggtaaggaactggcgcgatattatcaggtgagccaggatttgtacgcctgaataaagagcctagacgtttaaccactgtgctatgctgactattcatttttaaaaattattttgctttctataaaactcgatttcattatctgaattcttttttcccctatgtgtgtaaagtccaaatttataaactttccttgtgggaagtaatagcattctgatgaataatagtccccaggtcaacggcagctcttgccgcaattactggcagttgagtggcaaatacattctactttaagaaaggcagtagcagttcactttagaaaaactgataattcaaagcttttccattctggtgaaaattttcttagcaaaagctaagaaaataggtactgatgggagaaaacctgccccattgaaggaatgggataaaaacctcctgtttgcagatgccagaagcatctggagaacagtgatgtccaataattgcagctaaaagctgcattaattgaccagtgataggttgaaagctgcctccaaccaggatccctaacactctggtgctttttcataagcagagtgagaggcaggaggtggtcagcttccatggggttctccatacagaaagggagcagctgtgacagagaagtgtatttctacagaagaaagtttagcgtttcaaacggatgcattcaaatcacctggggatcttgttaaaatgcagattttgatgccaggggtctgggatggggcctgagttgtgcatttctaataagctcccaggtgacactcacgctgctggtccagggaccacactgtgcttagcaagggtttagactagaggaaggcagtgctgaattgttattgattttaaaaaccattttaaataaacatgcagcaaatctttttataaccttccaaaatttcagctgtcatttcctcatatcggtgagatttgtgagaaatcccattcctctgcaggtcagaatattgttggtgctgttagccctgtttcctggaagagagggtatgacattttttgggtcttttttatattttaactgctgctgtctgcattagtgtccatgctttgacctcttgctgcacccagagaaatctcttgcaccttagtaatatgctgtgtctccacagttgaataagcatgaatttgaatttctttcctcaagtgctgctacgaacctgccaagaaaagttttattaatacaactaagtaatccatttttcccagtgtaccccattcacttaagagtttcaatggctgtgtttattccatcatttcggttaaagctaattatgctcaaaagatgtactttaccctaatatgtgtggcttggtttttgttttgttttgtttttgtttttgagacgaagtctcgctcttgttgcccaggctggagtgcagtggcgcaatctcggctcactgcaatctccacctcccaggttcaagcgattcttctgcctcagcctcctgagtagctgggattccaggcacccaccaccacacctggctaatttttgtgtttttagtagagacagggtttcaccatgttggccaggctggtctttaactcctcacctcaggtgatccgcccaccttggcctaccaaagtgctgggatcacaggcgtgagccacaacgcccaaccaggcttggtattattttaactgaatgctgctgtcttaatgtctctgataaagtatatcatctccattgatctgcatcataaacaagcacaaaggtttctagaatatatctttttggtcattttgtttgaataccaatattttaaattacgtgacctttttttgaccaacagcagcaaaaaagttgtcaccacaagagccatttgtaatggtcaaaagagaaaacagaaatgtttccgtggggcttggtttgcagatctgtgtgtttattaattctgtgaaatgccattgaattacaataaataggaagatgttctcaatgggactttcttctccatgtaggaaacattcaaaatctagaacagaagcaccacccagcttggtgtcacaacagtggggctgtttgacttcagagcaactctatccaatagagatataatacaaaccacatatgtaatttaaatatttcaataacctcgtctttaaaagttgaattaattttataatatattttatttaactcaatatatgcaaaatatattttcaagatttgttcacaataattattctagagctattgtacattacttttttcatggtggaatgaagccaagcatatctcaatttggactagccacaattttgagtgttcagtaatcagaagtggctattggctgccatattagacagcattagaaccccttcaacatacttccagtgggagctgatgcctcagttggaagttttctacacactggagtccagggcagcgaaagaccctcccatttcatggtagttcctgaagcagaaaacattttcttatgttaaacctgaactgccactaaacaagcaccattgtctcttctcttgtgaagtttatagactagggtaagaaaaagacatataaacaatccattcctgcttcagggaacagacacatttgtcagccctagcttttcaatatctagaaaaatgttccccacattaggtgccagatgctgcacagtaaggtaacctccaagtgggctgagctagaccaggcctaggtctgctttcatcccagttctttcttgctttgcccgaaaggaaggcaaaaacaatgatctagcttagcttacaaggcttctttttcctttagacataggagaatggaggctggtcttcagatatggaatatgtgtaatccctccacagaaggcttcgacaacaactaactcaggcacatgtgagaccaaactcacagtataataccagtgcgattctcatttagctacaaacttttccttccttaccaatagatatttcactattgtagccaggaatcctgagaggcagtgccttacagcagagccttctctttccctgggctatactctccttctcagtaaaccaatcatccctcaagaagtcgtgcctgtaaaagatgatgtaacaacagatgtagtcttcactttattaatttgcatttatcaccacaagcttttcttcatgactattgctgctgttttatacctgtgacatctcagtatagagaatgttatccacctcattgctcaagccagaatctgggagtctttcttgaggcttctgccttccctgaaccacacaactgacctctttctgaggaagaggtaggggaatgggtagcactggttctcacgtctctgcactgcattttcacggtgagcatcaggtacttctcactgttgggtccagtgttcctcaaacttttatttgatccattgtgctttccctctggcatgctgcagtcatctggacaaggcctcaagctccctacatgcatttcctttaacaaatgcctctcaaaatatatgtctatatggctctcttcttgctaaagcccttccgtcctcccaattttctgaggagaccaaccttagctgcatgattcaataccattgtactagtgaccacagtaccatttttcccctctatctttttttttttttcttaatgaagccctgtgtgttattcaggattcaactcaaacatcccatcccttagtgatcctctctgagctttctgtgtagacttctagcacagaatgatcacagtgtgttggaattgactgttaacttgtttgtttcctctatcaaatcttgaagcaggcatgatgttttcaatcctggcatagttcctaaagcattgggtagtcaataaatatgtatcgaatgaatgaatgaatccaagggactctacccttagctacatgacttcaaggtgacacgagcttattggacatactcttggactgaccaacccccaaactataacttgtcttgcctcctagtcagcacggcttccttctgattgccctctccttctgaatcatgatgccatgattctttggttttagtgatcccacatgtttctcctggtctttggttctcaccactgggcaaggtattcttcctgttcttcagcaggaggaagcacttcctactaaagtatccttagatgaaggacttctccagggcacagcaggtgactttttcaccccatccagtctctgcttcagaagcttcttaaggggaacaaggttgtttgtactgtccagaaactatagtcagcctaatcttggctgatacctcaagaggaaaggctctacttggcaattacctttttgtaaatctcttcctcacaccctatatttgacatagactcctggtattgctctctaaccatttctactgttacatcccagagaacgttgcattagcaaaatttagaagttagcatcaaatagaagtcctctagttattctcgaatttgcttcccccattttaaaaagcttgaccattacttgcttgcctccagtatcaagacacatctgccattgtctataatttctcaaccatgctgactacgcatccacgagtataccttccagctctttcagtaccttgaatataatttgtaagtaccagtaagcagggtgactttaaagaatcctggatcatgcattttctttcttcctcccactatccttttctttttggcctctctcctgctttccattgatggagatgtcaggtgagtcacttaatgtctgtgtgcatctttcctcacctacagacacacagggtggaactaagtgatctcagcattttttttccagttccaaaattatatggttctgcaattctttaatggaagcaaaataggagttcaggttgctctgccttttctctggcactgttaccatgtcaaagcatcccctcccagcagtgccctagcctttctcattcctcttcaaagtagctttcacaattaaatctttaatgtcattatcatttgtttcacaaccctcttagctcctgttgaactcggcttttctgactgtcttcagacctcttcaccaatttctttgttaaccacagtgcccatgtatccactgtcagatgactccctctgctcacccctgcaggagtatttaagcttaaccccagatttcaggagttagagcatttctcctgaatctccctaaactcgcatcagatctcttttgtccattcaggttgtcctgtctagataatgagaatttaagttataagatttgtaaggatcatggaataaaggcatacaggcaggtcactatcagcatttccagggcaaccctgtctcccacttagatcctctggcttagaaactactgaagatctgtaaaacgtaatgaggtttcaaacagatgtggccactgcccctaggagttggataggatcctctgtgagacagggcagagaaagtcatgtttgactctattaggaaaaattctatggagtttacaatagaatcatagggaagctcttaaacagcaccctggcccattacagacaagtagacatggaaggatactttaaaacaaagtgtgttttcaagtgtttcacgtgtgtttcaagtttaaaacaaagtgagttttcaagcccaggaatgatgtgaatcagacatcagaagggagaatcaattcttgcagtctgatgtttgacaagttgcaagttgtgacctcgttcataccctttaattcagtgactggcagtgttggtcagctgtgtctttttaagtggatccatgttgaagtttgttgtccaggtgagtttcaaatactgggagtaacctgaaaagtcttgggcacagtttcctagatgtattgtagatccataggtagacacatggcttaacatcttccattcagttttatgtaaccagtaccactttttcatattgatatatctatatgtctttttctatatctagatgtcttttcttaagttaaatgcattggcttaaaaaagaaagacactatcagtgcaaactcacttttctttttttttttttttttttttttctgagacagagtttcactcttgttgcccaggctatagtgcagtggcgcaatctcggctcactgcaacctctgcctcccaagttcaagcatttctcctgcctcagcctcctgagtagctgggattacaggcatgcgccaccacgcctggctaatttcttgtacttttagtagagatggggtttcatcatgttagccaggctggtctcaaactcctgacctcaggtgatccacctgccttggcctcccaaagtgctgggattagaagcatgagccaccacgcccggccctcatttttattttctaaactaaaaaacagtaacctgagatactcactagaaaataccttggccattaattggtcagaactgtaactttcaaagtaacctattgtctgtttacatgccacatgacatgaaactctattttaatcaggaccgtcacagataatttctgcaataacatatatctagggatggttttcaaatggagttgtcatgttgtgtttagcagacaggagattctctattgttgtcaggccctctttacaaaagcatcagtaacccagtgatcctagagaagcagggcttaccactcagcttacttagaataaaaaagagcaaggctggtttctgtctgcacgtagtgtgtttgagggctcttttgtttagctgggcttccttgtagccaacaatgcttttacagtcttggaattggatttcattctcctgtactggtttttgaaaagtgtaaatagtttaatgcatattgttattctctgaaggtaacataggatgcataaaaccgtatacatctgaattgtctcctcgaccaatgaagtcatggaaagtcaagaaaaattaaaccgtctctggatttatacacactctccctttctctctctctgacacacacatgtgcacacacacacactttctctttagtgcctttcaaagttgtcctagttttcttacaattagcacccaagacatactttttcaataattagtaaaaaaaagttaatttttgtccattgttaaaacagtgaaattttctttttagagtacataggggccatcatactgagttttatgataataaatactattttgtatcatataaatatgcaatgatatataacatataataatttatatcattaaagaggggctgaaaaaaattgttggcttctacatgtttgttcctctcaagacttctcctcttaaattcccaaagaataatacttctttattcttaaaactcactttatgctcaattcccagaaacagaagccaaatagggtaaaacaagatgcccagtaatggttcttacagttctcaggttctgtagtacaccatttgaagctatgtagtcttcaaccttgagtgtatataacagagggaaaggcaagctctagacatccattccagtcctaggattctgtggttctgagaagtgagaagggagacaaatgagagtatgggaagttgtatagagggggggaacagacagaaaggaacagaacaatgagtagtcacttggattacagaaggaatggcaatggaggaccaataaataagtgaatgaataaatgaatgaatgaatgaatggaaagaaaagtaagtataaggaagagaatgaccaaaaatagaagttgaagtggtccatttgagctagaagcttggcaattttacaaattctagcaacttcttaagaagctctaaaaagaaagttctgggttaggaagtttctcataatagttttcccactatccagtccccatattgtcttccaccataaacatctgccatgataattctccactgctagacctcagaagactctccctttcccattaataaaaaggggactgatttcataaatttagcatattacgcattgcagcattctgcctttcatatcataggttaatttttcatggatcgttatgaaaaatataaacaaacttaaaattctatttatgattcagacaaccaacaaagtaatgagattctgtgttatggtagctgtcacatcttgtctcagcccattgtgtctaaatgttaactctcttattaagctccattaaagggttttacaataccaaattgtttatacactgctggttttctgctgcctgacagtagggcacgtttcactcattaatatgggtgatatcttacattgttggaaagagctgaaataaaaataaacaggaaggtggcatgtactaactgaaatgcttctttcttctatgtttcccaatataaggttatatatatgtgtgtgtgtgtgtgtgtgtgtgtgtatgtatatatatatatatatatatatatacacacacacgtatataaaaccctaaatatatatatatatatatataaccttaaatatatatattttatatttttttaacttgcagttcaacctgttgtcttacgaaaggggagatattcttttctttgttacgtttaaatgaacttcaccctgagctaccaaattatacttttgcaagcttgatcttcaacctcacttatgtccccatgacaacctttcttgccatgtgaaatttagagtaactcatattggtaggtttcattatgggtcataaagcactgtcatatacatgttcttatttcatcttcaccacaacccggtaataagggaagatagagatgctgaatctggtagaagagaaagctttcctaaaactactcagttaaaaaatacaggcaccaagtttctgtcccactgtggttagttcagttctaatgctacttgccttctttttatatttttattatttaaagatatacttttattttcttaattttctctgagtattctatattaaatttaatagcaaaaagctaaggaagaaaaaaataaaattgctaattattccacgatttaattggctattattaactttttagagtattttcatccagtgtttcttctggttttttgtttgtttctgtgtttatcactgcatataaaatatatcatttgtgcatgcatatagtgctcacacacacatatagtatttacatgcatatacacatttgagtattttgcctttttacaatgatactgtgatattttcctgtgtcaattaatctctttgaaaccatcgcttttaaggttgcatgataactgtatcttaatttatgtaacctttcccttaatgatggacatttgggatgtttcagagttttcagtgttataaattaccctctgataagcacctttataaaatattttgctacacagcttgaattatttccttaggattcctggaatggaaatgatgaatcaaaggcttgaaacatattgccaacaattttcttgaaaaattgaaggaaataatgcttccaccagtaatgcagaaaatagctaatttcaccccattcctgacaactttgagtatcatcactttccttcctttaccctttactaatttgattcatgaaaaatagtactgtatcattttacattgaacttcttagcttactagtgaggttaagcatttttatagaagctcacgcctgttccaaattaccactagaagttttcagctcgcctcagccgtgagtcattaccaggaggaatagttttttgaatcaacttctgtttcctccctcaacaaatctatgtatatttatcaagacgtatttggatgcaggcttttatctccctcttgacaaaaatgaatgattatgcacccaggtcttttatgcactgaactaagctatatctacttggaccttgttttaattgactcacccttcccctaatagaatagcgtccctttgaataggcagtattagaaaaataagagcctcacagtagattgtgaaagaaatgtcacatcagaatctggacattgctatgacaacccaggccccgtctatcaccactcccatcagcatgtgttgcaaaggaaacccctttgcagtgtttaatctgagaattttaatattaaatacatatttgacattgaaagctcacaccttatttgctattgtcaggcttgtttgatagacagctaactcggtctctttttatagtcaatttctgaaatgaaactataaattttgaagctgggcttcatcatcgcagagagcaaagcttttctagcctattgttgaaatgtcacattttataggatttatgtggtccagattcaggaagatcatttgccaagcacttaaggctggttttgctgccctttgcttttctcctccctgcaaatacatatggtggcagggggagagccattagaaaagaaaaattatgaagaagaacttacttgattcaatacaaatgtcagcctaagaaagaaaaagtcctgcacatttagtgtgaggagcgttgactccagaagcctgctctttggtgataggcatactgtttgcttctgcaaatgaagtgggcatcatatttgttgtgatagtcagtgaaagcctctgatttggtgcagcagtttgaatttatgctcataatacaagttctctccaatatgcttccaggattccttttgaaactccatgatatgacaagctctgtgatttggtcatattccatttagcttgttttattgctgttaattttacacaggaaaatagattatctgaaacttgtgatcacagtcgctgtcaagtggtcaaaaatgaagaaaaccaccagacagtgtcagatttattaaatgctctaggagtacaaaattaatgcagttctttgtctttgaaaggttcagtgtccacaagctggatttatcctaatggacaagcagtggaaagaacagtcgtcaattagctatctctttagccagactacacgttgtcggaatgcatgtagggtgagccaccagtgcacctaggcagacctccaatttgttcattttgactgtaagtgacttaatttaacattttttctaagaaatacattaggtagaatggtgaagtttcctttttttcatttttttcttaaaagaatcaccggtgaaaagccacagtaagtaggcttctcactccatttgttttcaatcaccacccttaatgcataaatttctgagtagcctgttactcttccaagccctaaactgtagcagtgaatgtggattggaaagttctggtgctgtatccactgggtctatgttgggtttgaacatgttttatatgcatagcatgattattcctgtgctagatgatcttacctgtggccctttgttttctgggttttttgtttgtttttttgtttgtttgtttgtttgttttagcaggaatgaattttgcattaccctcttatgagttacagtgtgcaaaatactttgaaagtaaagttttggttcccacatgaaccatttctcttttacacagcaatcatttatcacttataagtgttaatcacttattaacagtaatttcatctgctgaagaatttatcccctaatcatgtgattttgtttcttcatgtgtgtatgtgtatgcgtgtgtgtatatttacagcattgacattttgtattcaaaaatattaacttctcaccttggtattctggtagtgtaatgaaaacatctgttacttgtgtatggcaatgatgtttttacatctatttatatttgtgggtagattccaaattgattctatgtgaagatgcacttcaaacaaaattcagtaactacatgtctggctttgggtttttcaaactgtggggtttcaaccctgaacatgaagccctgatgcaggacttaatcctgaactctgcaaacgtttccttttgcacttcaacctccagtcccactttatataacatggaatattcttctggttattatgtaattcattatctaaaatatgttgtgagcagataagcacaaggactctgaatgtggcttgtatatttttacagcaactctgtgaatattctctttggtgcagagtggagatgtgtgtggaagcattcctcctgaattttttatagactctctccctttgccactctagttgctgtctcccacaaaatttgagtcatacctcaactgtacaaatcctcctttgatgttcagttgccctgaagtgtgcagttgtggaatatgtctaaatgtctcctgtgaagagattggaggcgttggttttaacaaaagcaataaaatgattacagctgaaaagcatgctggaggtaaacagacgtctgtccttgttgctgaaccattgctctgttaaaaaaaaaaataagcacatgatttagcctctctttgttgctcttgtgtctaggaaagtcaaaaggaaggaatttgatttttattgtccccaagatttcagtatagagtcagccctacagtatgagaaacaatatcttgcttatcgccctgaattaccattgtccaactgtgagagcatttgcaagaaggtgagagtgtttgtgaaatagacagaaagggaaatcatgtgcttggataaagctttttggtttctttagtgaagtttctgaattttcttctctaaccttggcacaaaggccaacactctacatgcagtaggcacttagtaaatttattttggtgatgggtgattggtctttagtaccatcaacatcccaacccagggctagccttggagaaggacacggagcaaggagaggtttaattggggaagccccactccacttcatccaaccttctaccaggacatcaaggtcctcatgatctgtagctttccctcctggcattacctcttgtccacaaagtattaattcacgtgcaatgaatggtgtctatggctacctagcactgtctgtacttcagcgaagagtaaagccttgaagtaaactgaggctgaatttctggcatcagcctggaggcaatgggtggtcactaggggcgcccccattaccctgaaaacctgtctgtgtgtctctcctccctagtccgtaatttcctttactaggcccaaccagtttctcctgaaaatattaatgagagcacttcaaaatgtaggttgttgaattttaaattaacctagagcatcacattgagtgggttttcatggttttctacattgtctgctggatggacttcctgggcagcaagcatatcttattcctaacgtcatagtctattcgcttttacccagagccgggcttcatttaacaataaggagatgttttcgattttaccgtatgtggaatgtaacatttgcatttggcagttctccctttagtcctgctcaagatttcagctacctcggcagagtgctagaaagcgatatgcttattagaaaactttattaatcagagtagagtgctatttggcagccagattctaatgaggatgaggagctaaatttaattcaaagctaaaggtcagcaaatggtgctagcctaccttttttaaagtgtgtgagcttggacgttctcacagtttccggacagtttcatctagaaatgtgcatgctatatttagtatgaaaaagcatggaaaagttttctaataacaccatttcagcacacatatattccatgagcattaataagccaagcacattactgcttggctagacaattcttataggagctgatggcactgagatgttatagcaattgccagccgaaaacaggaggccataagaacatgttacaatggaaagaatttcaaaaacttgtagacgtttctttaaacaatgaactgtctgtggaatatgtgtaaatggcagagtcactctcacaaagtcatgaaggatatatttgtggtgttcagcttatgtccctaggaaagaaaaataggaaaaagaaagttctccaggcagtagatgaaggtggtgttgagcggttttggcccttgcacatggcctccctatccttaaatggcaccatcatttcctcccttctccttcccacttctccttcattgcacactttcttattatcacctcccacaaaaactcatttattgaacacatcctaggtgagggccctgtgccaaagtctacagaagacacaagaatgattaaattcctcctatcacttagccactattgggggactagacaaagactcaaaatgtataaaacctatgaatgatcaccatgccacaaagcagaaggtaagggccataatgtaagtacaaagcactgagggaattccaatgtagaaaagactgctttcctccaggaagggttcatggaatagcctgtgcttaggaaaaaatgcacctgaattcatctatttttctccagcttcgtgaccattacctaggccagtctaccatcacccctcacctgcctttctgcaacaacctctattctgtcttccacagaaaagccagagatgtattctaaaacttttagttagatcatattacttcctggcttaaaatctcctaatgtccactcattttactcagagtcaaatccaaagatctgtccaagtcctgtaaagcccatatgatctcagttttgcctgtctgttcaacctcatcacttgccactttgttccatgagcattaagctccagccatatgcaatttttttttttttttttttttttttgagatggagtcttgctctgtcacccagcctggagtgcactggtgcaatctcagcccactgcaacctctgcctcccaggttcaagcgattctcctgcctcagcctcctgagtagctgggattataggtgccctccaccatgcccagctaattttttgtattttttagtagagatggggtttcaccatgttgaccaggtttttcatgaactcctggcctcagatgatccacccgcctcggcctcccagagtgctgggattataggcatgagccactgtgcccggctgtgtactttctttctcctgcattaattgattacactcattccctcattagggctttggctctagctgttttctccagaatactcttcatggagattcttctggatgattcctacttgtaattcagaccttagattaaaagaaagaggactttcttgactattcaatctaaagtagccacctagtcactgtcttctcatcatattgtattttaagtgactggtggcactgaccacggcttgatatttctcttcattggtttgtgtattgtttcatccccatcctcaccaccagtcaaatgtaaggcccatgtggttaaggaccttatatatcttgtattcctcctatatccccaggacctgtaacagttgattatgaatagtgggtgctcaataaatatttgcaaaatgattgtaagagtcttgaaggatttcacaggtagagagttgttccttagttcatgtggtaggccctgccactggtaaaacagcctgaacaggacctagtagctccgtgctctcaacaccttctgttcttgtggtggaaggcagacatggagaagtgagaattgatagataatgaagttgatacattcagggggtgatcattgctacaaaggaaacaagcaggctaaccaggtagagattgtcttgaagggtctacagataaaactgccagaggaggcacctctgacaagggagaatatgccttgagaacgtggaggcagagtgttttaggtggaagacccaccaatgacagactcctggggctgtgacaagcttaggctatcaaggaacaggggagagtgagaaagaatctctctgtgagcacaggagaagaataggtcagcaaggaggtggagagggaaacaggccagttcagtgacgggagggccatgtagaccctggggaatggtttgagaattaggctaaacgtgatgacaaggcagtggatgtttttaaacaattgatatgatcttaattatattgtttttaaaaggaggggcaagaattactggtggaagaggcagtgtggtcaaaggcatagagcagggtgtgggtgaaactgaggataagtttagggaacgatcagagcttcactggagactggactgcaagtggaaggaaagcaggaggctggggtggtgtcgacaatggaaagagagcaaagaggttattgtcacagggaattccatgagcagagttgcatctttggaaggctaatgtgggaatgtattagaatgaaggagtcaggagcggagagactagctgccatgctgctatgaaccgggctcgtggaagaaggaatgcaggggaggccacagtgctagaggctcatcattacaaccaactgaatgtaagatgcatgggagaaacgaagccaacaataatatcaaataatgtcatagtagagcccagtagtcattgtgcaccaggcactattctaattgctttaaataaaaactcactttgctcctcaaaactaccctacttggttttactctcattatccttatttcagagataaggaggttacacaactactctaagatagggagatggaaagtggcagaaccagaacccaagcaatctggctccagagcctgggctctaatgctgatcattattcccatctctaatgagcacagagaaacaattacgagtccagaaaataggagggaaagaagatttcaatggaaatgtgagaaggttgtttctggacaagttgagtgtaagacattggctcatttcaagttcaagtgtggagcaagggtgagcatggcttttggagctcccatgagatgttgcagctagagaggtgtgtcctcatgcaggcgggctctgttgaggacctgccccatgcgagccactccggggatcatatgttgaatagatggacaagtaaatatatgaaatgcgagggaataggataatcaaagtgctgggagtaaatagtatccccaagagtgaaaatatagacaaggagcctttagactccaaagtttagagaatccttttagagaatagctaaagagacagtgaaagaaacagacaattagattggagcagtaggaaggcaacaaagaagagagacttgccacaagggttgctctgccatatctagtccagcagaggttagggagagttttgctgggcagttttagcagtggtgaaggtacaaaccggattgtcatctgcccaaaagaaagggtggcagatggcaaaaggagacggcagaggattgttttttaaagtttagtgaaaggagaaggaaaagagagagacaggaggcaatagcttgaagggggagggggcggttaggggctactggacagtaatacatcacaaaggacccctagttgctccagagagagaaggaggaacaacatctttggggcctccccaggcgggggtggggggcattgtatatccacacctgtgctgacaagggcagtgggggcctgatttgcatagcagcaggataaaaaccagcctctggcaccactggattcttccctggtagaaactctcccagggtaggcacattagataagagctacttggattaattcggtgacaccatcttttagaatgagggtagaaagtactgacgtcaccatgcggctgattttagagaaacaatctatttctccactgacaaggatttgtggcagtcagcagctgttttatttctttttttttaaagctccctccacccctttcttcagacttctctggacttacatctgtcctcccagctgtgagcggctgaattccagggtgcaaaaccaagggagacaagtaggaggggcatacaaataatgattacatgctgcttcagtgtaaatctcggttcattgtgtgtccatgggcacatgccttcaaattcaagtgcatgcctctctctctgcctttcagtatctgtctgtaaaccttgatgggattaagcatatgttttaataaatattttgtttgctgtattcccattaatattcatagggaatggaacactttgggttttgtgatttctaataaacattgatggtgttgctagtctgtactgagcattcagtatgctccatcaaaatggcagctctaattaggttccttgaattagctaatggattttgagaaagatagcttagaaagctcttacagctgtccaagatattcctgccatggcagaaagacaaaaggcccctggaagctacagacttcagagctttagaaatgcagctgacagttaaaaagataaattacattcatattttgccagtgaaagtcctaatactgaattaatgttattcctgtagtgagtatccattaagcagctcattttattataaggatgcattttgaccattagctctttttctttcctcgctctccctcccctctctcctttttctccctccaattccctagatattttggacacggtattaaaaagcatctttgaagaagaggaaatgattccctttttttcaagttataaatttagaagctctcttagatatacaataggtattcagtttttttaaaaatgccaaagtaaatatataaagaaataacatagtgattcaatttaaaccttgaggcttatattttatgtagaattggaaggggggaagcttctagctagggggcagtgggcttgtttacacttggaaaagagattatttgttagaaactatctcgaataaaacatgttacctcctttcatcttaatatggaatgtacaacataacacaacgccattccacatgttcctcgcctgtacttcctaagaacacagtcctgtaacaaatgaggaactaatgacatctgagtgactacacttaatgctacaaatggggggaaaaataccacggacaatattaaaagttcatggcaaatagcagaattcgggaaacaaggacagtcacccaaaagctccttttattagttggatatgtcagtactcattaattctgtaactgtgttcagcataactttttgctttcagtttattcatttgtaaaactaatacctggtacctttcatctgaaaagttacattcctctaggaacacaacaaatcctctagggaaatgtttcctgggtcattaactctcaaatgtccaaattctgttttcctccgtgagcctctgtagcccctctgcttttccagtcctgcctgccttttggccttttttcttctcattagtgtctttaccaaacaaggggctgggcaaggaaaagaatgtgaaactcgtgtcaattaattggggtattatttacagctctgggaaagcacttgttgggaaagaagctaaagttgttggtttaaatgagatttttttcaaaatcatctgtagtttttatttttcatgctcttccaaacctcctgtttctgcagataattgagagctgactaaaagactgttgctaataaagctgttggaacgaagcaaggaatcagaaagcatagtgttgacggaacatatagattacagatcagacagctgctttacctcagtatgatataaataaaatggaaaagcattgttatgtgaagtgccagaaaaaaagatactcaattattccccacacatgacttcaccatgatgggtaaaaggcataattgacatcatgtttattgaaaaaactagcaactgtcacactgtcgagaggctactgagagctggaggaagggcatttttttattcgttttcactgtgggttatttatagagttcaattgtcagcagcagagtgcctaattttccttcttctttgatattcgacaactcattcactgttcagatcaagaagacagctgcaaattgctccatggcagatactcaggcattgccattacctcgcctgaatggggcaatggctatttattaattaagattctctgcctactttcccttaaagtgccagtgggaaaagtctttgtcaacccataatgggtctagtttcatttgttttgttttgttttgtttcattttaactttttgctgtctgatttggcagccagacccagattcctaatgggaaatttatcattatattgctgatgcatcgtgcttcatcaccagatgatgttactagtcaaacaagagctctggttatggaaaatgatcagttttcaaactgaaagaaagtttcaatgtcccatttcccccatctccagtggccctctggcacgttagccaacaagtagggagattgaaatagagaacttttgccaatgattttatcaaccatttagcctgcactgtatgcacacacaagaaatcatcaaatctaagtacaagaaaagctcagagaggtcagctagttccttccataggttgtgatatatggggttacagagagctagcgtctcccagagttctcttgatatgaagcagaactctgaggatggtggtgctggccctacttgcaattcttcagtgggtctgcatcatcccctttagaaagattggtggatggggctgttaaggtcctaccagctgtatttcccagtttctccacacattccccacacttgtgcggtgcctgactgtgtgccctttcatgtggccactccatttcaagtggtgttccttccagctggcatgcccagccaccctctctttatccttgtctcttctctaataggcctttcctgacctccccaagccaagttaacaccctctgctctgagctactgctggagttcatcatacttcatgatacttcctcttaataattgccacattgcactgtcattatttatttatatctgtgtctccccaactagactgtgaaatccctgagggtcaagtcggggtcttaatcacctttgcatccctaaggccacagcaatatttatgaataagtaaagcttaaataaatgtacacatcagaaatttttcagagggttattggagagcttttgaaagcacttgaggatttaggtctgctaccagtttattattttctattctgttttgaagagaaagccagcattcccctagcaaggatttataagaatctgagcatgttttaaaaacaactgaaacaatccataggagatggtaatgtcagctgtctgctattctgtacacccctaatgttggaaggtcagtagaaggccctagggttagcagagctcactttgcatctaggctaatgagagctgtgggatcttcttggattgaatgccctttgggagctaagtagatgctaacttttgatgcaatctgcatcagtccattctagcactaatatgaagaaatacctgaggctgggtaatgtataaacagaagaggtcgagttggctcacggttccacgggctgtacgggaaacatggcagcatctgcctctggggaggcctcagggagcttttacttagaggggaaggcaaaggggaagcaggcacatcttatgcgtctggagcaggaggaagagagtgggttgggtgggtgaaggtaggggaggaaaggcgctacacacttaaacaaccagatctcataataactcagtcactggcacaagaacagtaccaaggggatggtcctaaaccatgatccaatcacctcccaccaggccccacctccagcattggggattacgattcaacatgagatttgagtggggacacagagacaaaccgtaccacgagttgagaatctatttggattaattgttatgaccttattcaaaaatctcagagtagcatatggacgtaaaaggaatgaaaagaatgtaggtgatatcagaacatgttcataaattcttggacctagacctaattgctttatgctaatcatattagaatactgcgtatataattctgtgtttattacatagcacgatttaacaccatatgtgatcattaagattggcctcatggtcacttacctatgtgacccaagcatcccttctgggcatttggagaatgtatatcctttaacagtagaaaagtaaggactcgttcacttgtcacatatatttagaacactttgactcttaacaccgagggtcgagctcctaatcacaatctttagcttctttcaattgaaaaatgttttctccttttttaaaacactcttttcctttgtcactgttattattttcccaataccctccattggggaagaaaaacaaaagcattgttgtgtaagtaagaaactgctgtattaatctactgacgttttgttatatttttcacttttcactatgcactatcctgactgttctcttctaactgacataatcctctaaattaaaaaaaaatacaagctaccatccgtgcactaaattatttagagtgtccttatttttccttaaaattgtgtggtccattaaaacttactttcttattatctgtaaggaaaggttaggtacccagctgttgggaatcagtggcctttgatggtattccaggatctcttgggagaagagagaacttctatgttgtgtcctctgaggaagaaggaatgtcatggaggcctaggaaattcccaaggtttcatggcctgcagcccacaaaggcttatttttcccagaattgaccctgaaagtttaatccccatataaatgtcagatatgtattcttaaaactcaactgtgtttgatttaagcctaaaagataataattttatctttgcagttcctgcagttgttggtgagaatttctttgagaaggcgtgagtgtgtgcgtattagtgttatcattaatttgttcaagtaccatctaaacaacattttatttctccttaaactgtcttttgttcagttcaagaaggtgaacgataattaaaataatacaagttttgtaggtttcctctatttacctttttaatcaatattttgctaattttgttttggaccgtcgagtcctttgagaaaacctatagtattccaagtggagtcatgtcttaaacaaggttagtttctaaagtcattacatgagacaaaaattgtgtattgacaaaattaatcttgggaaacactttaggacagtggtccccaacctttttggcaccagggactggtttcctggaagacaatttttccacagggcggggggtgttgggggttggggaacacagggccaggcactagattctcataaggaccatgcaacctacatcccttgcatgcgtggttcaccatagggttcgtgctcctataagaatctaatgcagccactgatctgacaggaggcagagctcaggcagtaatgctcacctgtgtaagctcaccggtttctaataggccatggactggtaccagtttatggcctgggggttggtgacctctgctttaggaggatactatattggactctgcctatgatctctcactgaacccactcactgctgtttctttagcactgcattagatggctcttcccttggttgagcatcagctgaagtagttggcttgcatatacaaggccatgttgtacaagtaatatacatccttaaacgctgaaatgatgttcagcacagcataaaacttacattaggaaaggtgcctaggaactgacactgaccaaaggaaatcaactcagttcatgttcagggacatatgttcgttaaatggaatgtccaatggaatcactatcactacttaaattgctattctgcccccaagcctctgtttgtgtctaagctcagatatttggtgtatcaattaaatgcagctgggatgcagtatcactatactccagccatgttagaacagctatatctatatgaattataatatagactatggcttatttatcattttttaacagaagacacaatggatgcacagttgcaaattgatccaaatctatttttctttgcatgtatgtatgcttgttttgcaaagatgtagagtagaaagaaagggataatattgctgccatccagtgtgaacttttcaactatattttaaaatctttcttttttaagaaaccaaaattatcgtattaaacacttgataagtttcttctgtgacacccacatactgtatgttgttaataaaattgacaaaatgccttgagacaatatgtatcacacacttacacataactttgaagtgtccagtatttgtgtaaattacttaaggctcaaaaatattgcactgggggctgggtgcagtggcttacagtggctcacacctataatcccagtgctttaggaggccgagacaggaggatagcttgagctcaggagttcgaggttacaatcagctattatcacaccatgtactccagcctgggcaacagtataagactctgcctctaaatatacatatatatgtgtgtatatatatatacgtatatatatatacacacatatatatggcatatatatgtatatatatacatatatatacacacacacacatatatatggcactgtgttggaagaactgtattagaatactattcaaaatataaataactcaaatgggtattttatgactgatggcaaaactgacttctaaaatttgaacacagtcaggaggtcattgtacagtattagaataaggcagttatttgttactggcttattatggtgaactgaagccataaataataactggcatgttgttgaattttgagttacactgtcggggtcactcctaaggtatttctccctttgtgagaaatggagatacagaagcagaatgttctgattagaagccagccttgcattgccccaagtgataaagagcaaaggtagagcaatgccttttatcagaagaggagatgacattgatctggtgacgattctcagtcacaacaatcaatcacataggaggaagttgccttcgtgaatcaatggattactttcagtggtaaatggtagctgtggttcatggtgtgtgtgaaagagcttaccatttcaaaattgccaagggaagtgggcctttatttcttttttatatatatatactttaagttttagggtacatgtgcacaacgtgcaggttagttacatatgtatacatgtgccatgttcgtgtgctgcacccgttaactcgtcatttaacattaggtgtatctcctaatgctatccctccccactccccccaccccacaacaggccccagtgtgtgatgttccccttcctgtgtccatgtgttctcattgttcaattcccacctatgagcgagaacgtgcggtgtttagttttctgtcctggcaatagtttgctgagaattatggtttccagcttcatccatgtccctacaaaggacatgaattcatcattttttatggctgcatagtattctgtggtgtatatgtgccacattttcttaatccagtctatcattgttggacatttggcttggttccaagtctttgctattgtgaagtgctgtaataaacatacgtgtgcatgtgtctttatagcagcatgatttataatccttcaggtatatacccagtaatgggatggctgggtcaaatggtatttctagttctagatccctgaggaatcgccacactgacttccacaatgcttgaactagtttacagtcccaccaacagtataaaagtgttcctatttctccacatcctctccagcacctgttgtttcctgactttttagtgatcgccattctaactggtgtgagatggtatctcattgtggtttttgatttgcatttctctgatggccagtgatgatgaccattttttcatgtgtcttttggctgaataaatgtcttttgagaagtgtctgttcatatccttcgcccactttttgatggggttgtttttttcttgtaaatgtgttggagttcattgtagattctggatattagacctttgtcagatgagtagattgcaaaaatttcctcccattctgtaggttgcctgttcactctgatggtagtttcttttgctgtgcagaagctctttagtttaattagatcccatttgtcaatgttggcttttgttgccattgcttttggtgttttagacatgaagtccttgcccctgcctatgtcctgaatggtattgcctaggttttcttctagggtttctatggttttaagtcttaacatttaagtctttaatccatcttgaattaatttttgtataaggtgtaaggaagggatccagtttcagctttctccatatggctagccagttttcccagcaccatttattaaatagggaattgtttccccatttcttgtttttgtcaggtttgtgaaagatcagatggttgtagatatgcagcattatttctgagggttctgttctgttctattggtctatatctctgttttggtaccagtaccatactgttttgtttactgtagccttgtagcatagtttgaagtcaggtagtgtgatgcctccagctttgttctttttgcttaggattgacttggcaatgcgggctcttttttggttccggcctttgtttctttatgctccaccactatggcttgattcattgggtcaaggtccagcccagggttaagatttccaagacaagtcttcgagctataggagtcaaaggatcagtttaccaagctagggatggaaatactaagacaaggatctcaaaggaggcagatgctgaaagcaggacacatattgagaaagacaaaaggtcagcctcaggttgccatggtgaggtcgggagcccagataagccaagccaagttgtcagattgttgcatccaggtcaaaatgccacaggcagcatcaggatggctggggggaggaccgcagttcaggattatagtctgagctgatgtattattgtgattttcaggtttcctctaccttatgaccctaacttgcatgttaacctctctggaccagtttctcaggttgcccacaggatcctgacataaggatgagtaattttgttgaacccttgaaaattcatgcaaagacacacttttcaaagttttatgttagtgtagagcatagtttttcatcagattctgctgccgttttatgtgacattaaatactctcttaagatgctgaagcattgtttcctcacctactaagaggtatcatgtcagagataatggacagaagaagcccttagaaataaaagcagattttacatttggaaggtttgtgttgtctgtttaatattattcaccctttccctaaattcattattcttaacatagaatattataggcaattatagtaaacaaagaccccttaatttagagtagagtaattgttttaatcaacaagataacttaaatctggtagaaattaaatgtccatataagctaagacatagtcttgttatttggggggaatcttttggcaaaaataatttgaaatgggggctaccttcattaatagtgacagtaaatttgggaagaaattagaaagaagtatccccaaagttgtccatggatagtcagctatcagtcctaaaatttcaccgggctaaacagtgaaaaatcttatttgtcaatgcacctttgaaaaaaatagagatgctttataagaaatgggaaacggggaaaatagaggatttacacaatcataactttacctggatatttacactggataattttcagagctgttctagacttaaatgtcatttgaagaatgctatggaattaagttccttaaaaagcaattatttattattaaattagtatatatgggcacactatataaatgtattttcattatgagatgttaaatctggagagtatgagtgtaagtggtgttgggggtgtagtttctttaaatcttaaatgctcttcaattaagaatcctaaatgcatgtacaagagtctctcaaagttttatttgacagaaatctttattaccaactgaaaataaataatacttatgtccatgactatctgtcttcagctgaatattcttttccagaatcttttcttgggatttgagaaaaattagcaaaataagcgtgcatatagcctgtttaattatattatagttatgttattgagagtgtgaatgccatagaatctcaggtgttttagaagttctgttcccactatggaaaaaaaaatctgccctgttttctaagacagaactatggtactgttaagttttaagtttaaaaataaagctgggatgatttttagcttcttacatgccaaaagacaaaaacaaagaacactccccctgtggaagaagtcaggaaaataatagtatcttggcgttcttaaagggtaccaaggtgtttttctttattccatgtctttaaaccctttttgagaaaaccattgaaattccacccttttgtgagtatacaaaaattaacaccatacttacataattaacaatcttaaaggaagcatcaaaataacattttatagtaacttcataaaaaattaaagactctgtaaaacactaaactcaaaaacactccctatcctactcactgttgttgacacgcatacatccaatttaaagggttttattcagagagttcgtaaggattatcacctccagataggaatattcctgttaaagttacaggctataaaagccatttcttttcatttatgtatgtatttatttatttatttatttatttatttatttatttatttatttatttttgaggcagagtcttgctctgttgcccagcctggagtacagtggcatgatctcagctcactgcaacctctgcctcctgagttcaagtgattatcctgcctcagcctccctagtagctgggattacaggtgcatgccaccataccagctaatttttttttgtatttttagtagagatggggtttcaccatgttggccaggctagtctcgaactcctgacctcaggtgatctgcccacctcagcctcccaagtgctgggattacaggcgtgagccacctcacctgaccttataaagaccatttcttaactgcatcatcaaatctggacaccaggctggtacccacaaataagggcagtgctcaccaaaggccaacacctctccttccaaatgaagagctacatcttgaggctgtatgaaaacaacacgaaaacagaaacagctgtttgaaatcaactatatacaactgaatcctggttaggatgcatatatttacatagatgcccacttatacatatgtaatcacagataattcccaggtcccacagtggccagggtttggtggtagtgaccacctccctctcattcagttagtggtgaacttccccagcagttctgtctgcctctcaatcctggtcctgatccagaatgtgtctttcatgtaggatctttgtcatatgttgattctcctttgcaccccattccgttttataccagctctctacataagcctgttagagatataatattaattgcccagaaatctcagcctgcagtggctccaacatcattttttaatgaatacggacttcattgcatgtatttctattactttggttacttctatttttattgcaaagatctgtgcaaataaaagaatatcaaaaggtacggctataaatgtgctctgctaaattccctctgccttgaaatgcctgtgaaccgcagccacagaatgcctgctgcattttaatgcctttcttgcgaggcaacatgatatagtagaaacagcgctggttgggagtcacacaaatcctggcccaccattcaccagttgtgttccttaacgtctctgagcctcagtgtgctcgtgtgtaaaatgtcaacaacaatgtcatcttcacagatttgactgaggcttaaatgagatgaggtatgtaaagcacaaatgttgtctttaggacatcataggagcttgataaatgttaatttttttcagcctgcagcagtcataggaggagatgaaggcatgcacagatgaacactcattttaaaaagtactacagttgaggtcatttttaaggctagattccaaatgccttagtgtgatgtttatgacatgtgggaatttgttgctgtaggtggccatgaagaaaatgacatggtttctgaaatccattacaactttaagctctgtccagctctaaagtgttataagaaagggcctgtttaatgatacatctgcctttaaaggcataagcaatgtaatttatttttaaaatcattacaatatacatcatgttattatactgcttgaattaatttcacataaaattccagcacatcgaaagtgtaagactgtcattgatcacctatatagggatacagctgtaatagaaactttttgtaaggatggccagggctttacttcattcagtgaataaataattaggaaagcctaattgttaaactaacaatgtggagatgaggttattgacacttttactagttttatatggtttcaatagtatttgaattacatcatgatctgatgtcacttctgaagctatttctagaatcagtgctgctaaattccatgaagcaaggaatatagaacaaacgacatataaatagggaaggaaaatgggaatcctcagaaagtaaatcctgtaggctagccttcacttccattcttgttcagtatcttgctagaggacccagtctctaaaacataaaatgagatgaaggaagggaagtaggttggaaggcagtaagccatagtggaagagcagtctttgaaatgagaaaacacttgttaatcatctatttgctaggagcttcatattcttcatctttattgagcagaataataaatccatcagtattttttgaggttttaagatattgacagcacctgtcacacaggaattgtaaataaactcatgtacaattcctatagattagtagtggctttctgaggttctaggctaaaagaattctgagaattctttcccaattacagcattgagaaagaatgctctaattgattcgtgatgtctgctgtggacagagagtggagtaagtaaaagtatatatagatatatttgctatataagtgttcaataaattataaccattatgatgattgccactatcacaaaggtgtatgtccctctaaaatttgctaagtttctacatcttcagtgcaatatggaatcaattaattgctttggttataatagtggcgtatattatttttattaatttggtggtaagcatatgtgtattatctgctgagaagagctacaaatcagaaattggaatttgctgtccctaatcttaccaccttaaatacctatttaggaaaagtctgataccatttctaaaagtagaatgagggttgagaggaaaaaagaagagatgatattgagacatcgtcccaggttaccacaaaaggtttgcacagtgttccatatttttaaaaaatattcacacaagggagaagatacagcatgttttgcacttagatggtccatgactttctgggctgttttcctgttttttctcttgggccagatttcttttctgggtaaatagccatgctcctgtcagccacaggggactttctgaatcctgaacagctgattttgtattcctgccccattcccttatttgagaacagcaatctgatcaaacccatatttttaaatttatgcatttataggcatatggaagaatagtttacagtctcagtacaattttttttttccaccacaaatggaagaaaagtgtgttcttagaaaacagtgctttatcagtttcttttttttttttctttattactgatgacttcattctacttgaattcaaggcttcagtttctttggggtaaactaatagattatgtatgcgatgtttgcaccatgttgattgaactcatctggtgagtttgaacgcagctcatgaatttccgtaatcgacagaagcctgtgcgttggatacagacaccatggtcatctcgtattactcaagagctagggaagctgttgaaaatagactgtgctgcttttcctgcctgcccatggttcagaaaagcttatcaagacttttaatttgttcttactatctttttcaagtgctcaaagaaaactttttttaagtatagtaaagaaagagaattagaactattatgagagtttcaacatacatattgaaaaaaaaaaaaaaaagaaagaaaggtacgtgattcccaagggtttgtcttttctgaaccaaaggcatcagctgctgagtgtctgtcgagcacccaggaagcccagaaccctgtgcgaactgtcagggagcagccacaagacagaggtacatcatccagtttgcaattaacttaccatctagtttgagaagaatgcttttcctccaaaaggtgtttactcaccattttttttttttttttttttgtaatttacaaacacagttgtaaaatattttttaaaaatagatgacctctttctgttgcttttaggtacctcatattatcagatatctcatttaaacttggaacccaactgtaatatttggggttctttttgacatgcaaagctcttcacgctggggctctacctacctttccaagcctcacttgtccctcttctctttgatcctcctatatttctttaaaatactcacacaagagagaagatacagcatgttttacacttagttcatgactttctggacttttttcctgtgtttattccccaaatgctacagtagtgatcctcacatacccgtgaaacataagtgtcatgattgataagatgttatcaattgagttaaagtaccaaaatttgtaagtgatatgcttctgtcattattagagtaaattcaaaatacccccaaactatggctgggtgtaatggctcatgcctgtaatcctagcactttgggaggccaaggcaggcagatcacttgaggtcaggagtactagaccagcctggccaacatggtgaaacctcgtctctactaaacacacacacacacacacacacacacacaaagaatttgctgggcgtggtggcaggcgcctgtaatctcagctattttggatgctgagacaggagaatcgcttgaacgcaggaggcagaggttgcagtgagccaagatcgcaccactgcactctaccctgggtgacagagtaagactctgactaaaaaaaaaaaaaaaaaaacaggccaggcgtggtggctcacgcctgtaatcccagtactttgggaggccgaggcgagtggatcacctgaggtcaggagttcaagaccagccagatcaatgtggtgaaatcctgtctctactaaaaatacaaaaattagccaggtgtggtggtatgcacctgtagtcctagctactggagaggctgagacaggagaattgcttgaacctaggaggcagagggtgcagtgagccaagatagtgccatagcactccagcctgggctacagagcaagactccatctcaaaaaaaaaaaagaactttaaagtcaccagaactcacttttattcgaatttgctttgtaaatgagagtggaaagggaacatacaccatacacctggtatgtgtgtaaggcaggacaaaagaagttgaggaccagtgcttaaccaaagtgatcgacttgcatgtctctaaagcaagatgctttctcattgctttactttgcactcactgcccttccctctacctggaatatcctcctctcacttgtctagctgttgagcacctttgtatccttcagggctcagctgaagtgtcacctcctccatggagccttctgtgattttcttcaatggccctgctctcaccttgtcaaagtttaagcactctgcgttcccatgaccccatgcaaatctctgtaagagcacaagtcataatggactgtagtcttctgtatccctctctgtcccctacctcccagactatttgtttttgcaggtaaggactgtgaagtgttcctttttccattcccagattttaacgtctggtgcaatggggcactcagttatgcctcaaatgaaccagataagtagaatggctgttcagatctgcctgtcattcttttgctccctagccctgtataatatcatgtgatactggttccactaaaataactacaataacctaatctaagctacaagggaggtgctagctgagcagtttggggttgggcagatgagttactggaaaagctataattcataagaggaaatactggctaaagtacagagagaagaacttggattagcacgttctactctacaccagcttcccccaccttaaaaaaaaaaaaaaactttcttactgttttgttttgtttttttactgtcaccttttttacacgtgtcctaactgtacccatatattgacatgtatcccatccccaacccccactcccaaagttcatgagcctcatggaaatgaatgctaacatattccagccctgtctcatatccagccttcaggtcaaacaactggagctttgtcccaaattagcaatacttattgagaaaatgagatatccatattaaaatgtgacaaaactctgtgtgtgtgattataagaaaaaagtggtgggccttttaattgctctaaaaggtaaagactctatcttaccttctcattcaaaaggcatttattcatcccaagtcagacatttgacccttggaactaaaggtaggcacgtaaagaccactttttgttcatatttatgactgatttcaccattttcctggcatatttgaattacattattgaatcttccaaatttagatgtcaactcctttaacaagaagatccaaaagtgatttcaaagatgatgtacactgtgtgaatctgattatttgtctatatcctgtagtggccgtcctacgggtggaagcactgaccgtatccagaagttgcggaaagagtattatcaggctcggagggaaggtttccctttatatgaagacgacgaaggaagagcaaggccatctgagtatgacctactctgggtaagcgcatgcatgatttcaatcgttgaattcatcttttctaagaatgtttagagcagaagaacacggtcaagaatgttctgtacataccagattctatttaggtttcttgggcttcatagacaggaacattacccaaaccacaggcatattctcccacagaagctgtttatggaaatcaaacgccgtgaacgtgcagtagttcattctgattgctctcatacttcctgttatatgccaactggtttgggggaagcagaagttagctactttaaagagggcaagggatctttgtcaccatccactgagctttgattcttgcaacacaagccatctctcctttggaaaatggtgattagaagtaaatttcaaaagggttattgtcagagatgtcagttgtttgtttattggatctgagcacttcacattctgctgatcttaccggcatactaggatggatttgttttgagataagggcagtttttgtattagaggattctttttgctcaatcctttgacattcagggaacagaaaagaatacagtgaccactgaagaaaaactcattgggttttttcagagtggcacgattcactctcttgttttcaagaagcaagtctgtgcctacaagatgtacttaactcttcagcatctacaaaaatgcccaggaagaggatgcttagaattgcatgaaatgtgcatgcacatcagatacatagaacagtggctgacatagagctggtgctcagtaattgttagttcttgttactggcattattatcagagcagagctgaacatggtaatagcagtgtccttgctggggttcagttctcactcaccctctaatgatttctgccttctactgcgccttttagagctgctctgagaaccaggtaggggactctgttatccccggtgcccatgaaagacaccggctcctttgaaaggcagatctgttaaggcaggtttcctttcctgagtttcacactcaggtttatgctcataaggtcagagtggggagaatagagtctggcgactgagctgattccctctagttcttacatctgtgtggggggcctgtcatgcgttcatctctacactggggtgtgaaaatcagtttcaggatccaccactgttgggcagagcaaccggaactgctgagcccagaagattgcacctgtataatggagttccaaaacactaatcagaagtgcacagtgcagatgggcgatctcaaggccaagtggcttcagcctctttggagagaggcagcctgagactatggatcggaacaaacagctatttattggtcttattatagatgttaggattaaacagaatgacacctagagtgatgggaaaacttgtctcttagcttctctgtagcagaagagaaagatttccacagaataacagattagataacaattcactcagtttcaaacttgatcgagatcgatttactgcctctgacaagagatgtgagctacttgttaggtaaggctcagctccctcgataagccaaacaagcaataaaataaaggaaagtcatttccactgtacccaaaacagaacaccgtgtccagcgcattgaaaagtgctctatctcaaaacctctatgaattcctatgagcaaaataagacaaataattttagacaaagtagtcctggttgttttgaccttattttatatgatttccttacatcaagctgaaaggatgaaggtgcttaactttcaagagacttgaagtttcctctgaccctcaccaaacctgagctagataactatacccttgggtgctcccttttttaatgattctatttttatgccaagtaaacgtgtaaccagaccatctagtgagtaaagaagtatctctagtttaatttgtgtttcccatgctccggtgtgttgagctctgccaaaagtgactgattttatgtttcccagacaatcggggtctgaggcttcccaaagggatgcttgggaaatgcactgccgtaaaacacgagtgttctttgtgactgcctgagatactccaagccagggattagaatctcagcatcctttcctctcctctccccacgccaaggaaaaacactagtgttttgtattaaggcaggtttcctttcctgagtgtcttttgttcagcgtaggcctgagaaattacactgttgtcttgccacttttggagagatctaggaaagcaagttaagaaagttaacatttcattcctgtcaagcggccagacccaacaaggcagcttttatgagactgtggttcctagaaaggcaggtctttagcatcatcaccagggcactagctaaaatcagatcacagtcgcgtgaaggggaagaatgggcccaggagagaccctcaagggatgcgccacgtggtcatcaaggattctgatccacaattctgaaaataggacattgacttcaatcccttgagtaaacacgaaagcggtccaacttctctagcaaaaccactgtggaccagcatcatcagaaatattgttatgaacttagaactcccccaagtccagagtctctggttgaaaggcccgatgagtgttttctggagtcattctatactggggaacttctgaactatggagaaggaaattacaaagataagttacctaacaactactcgtaaacccatttcaaaataggctagcaagaatgaaagtatgctcactgaagtcttcaaagccaaaataatgagaataatcacttgaaagtttattagggtctatgaatattttaaaatatatatataaatatatatgactaatactttttctttggctggccctggactttctagatcttctcagaccaacttgtatgtagttctctaccactattgcacctgcccagtggcctgaagtctaagctttctcttactcctccctagggttctcacttggtttcatgcctgtcttctctcccctctcccttatcccctcccctctcccctctcccctctcccctctctcttctctcttccctcttccctcttcccctctcccctttttcctcccttctcctctcccctgactcctattacattttaacaaatatttgctaaatcttagtgtagaccaggtgctgataacaagaatatgacattacttccaccttggaggaactcaggatccagccaggaatagatctaagcccaaacaaaatggaacaataatatatgtgataaatgctgtagtatagagaggtattagcttctatatgtactgagagagagtagttcattctgctggaggtgcatagttggagacagagtgctaggaaaactatagagacattttgggagttgcctcagctgacatactttgttctttttttttttcatactttgttcttttattctcaaatttgttggatttttttccccttttgcaaaagatctcctgatttattcgctttgttttaaaataaatgaatacttctgagggctctgttctgttccattggtctatatctctgttttggtaccagtaccatgctgttttggttactgtagccttgtagtatagtttgaagtcaggtagcatgatgcctccagctttgttcttttgtcttaggattgacttggcaatgcgggctcttttttggttccatatgaactttaaagtagtttttttccaattctgtgaagaaagtcattggtagcttgatggggatggcattgaatctataaattaccttgggcagtatggccattttcacgatattgattcttcctacccatgagcatggaatgttcttccatttgtttgtatcctcttttatttcattgagcagtggtttgtagttctccttgaagaggtccttcacatctcttgtaagttggattcctaggtattttattctctttgaagcaattgtgaatgggagttcactcatgatttggctctctgtttgtctgttattggtgtataagaatgcttgtgatttttgcacattgattttatatcctgagactttgctgaagttgcctatcagcttaagaagattttgggctgaaacgatgccacatatctacaaccatctgatctttcacaaacctaacaaaaacaagaaatggggaaataattccctatttaataaatggtgctgggaaaactggccagccatatggagaaggctgaaaatggatcccttccttacaccttatacaaaaattaattcaagatggattaaagacttaaatgttagtcctaaaaccataaaaaccctagaagaaaacctaggcaataccattcaggacataggcaggggcaaggacttcatgtctaaaacaccaaaagcaatggcaacaaaagccaacattgacaaatgggatctaattaaactaaagagcttctgcacagcaaaagaaactaccatcagagtgaacaggcaacctacagaatgggagaaaatttttgcaatctactcatctgacaaagagctaatatccagaatctacaatgaactccaacacatttacaagaaaaaaacaaccccatcaaaaagtgggtgaaggatatgaacagacacttctcaaaagaagacatttatgcagccaaaagacacatgaaaaaatggtcatcatcacttgccatcagagaaatgccaatcaaaaccacaatgagatgccatctcacaccagttagaatggcgatcattaaaaagtcaggaaacaacaggtgctggaaaggatgtggagaaataggaacacttttacactgttggtgggactgtaaaccagttcaagcattgtggaagtcagtgtggcgattcctcagggatctagaactagaaataccatttgacccagccatcccattactgggtatatacccaaaggattataaatcatgctgctataaagacacatgcacgcgtatgtttattgtggcactattcacaatagcaaagacttggaaccaagccaaatgtccaacaatgatagactggattaagaaaatgtggcacatatacaccatggaaaactatgcagccataaaaaatgatgagttcatgtcgtttgtagggacatggatgaagctggaaaccatcattctcagcaaactatcgcaaggacagaaaaccaaacaccgcatgttctcacccgtaggtgggaattgaacaatgagaacacatggacacaggaaggggaacatgacacactggggcctgttgtggggtggggggagtggggagggatagcattaggagatatacctaatgttaaatgacgagttgctgggtgcagcacacgaacatggcacatgtatacatatgtaacaaacctgcacgctgtgcacgtgtaccctaaaacttaaataataaaaaaataaaataaaataaaataaatgaatacacacacactgtaaggtttgtaaatatggacttgagaccttaaaatcttttcagctgttctgttgtgtaactgttttcccgtcttagctctgaaaagctgtaaagaacaagttgaaagaacttcagtggctgcaagtaaaacagtctggtgagtttttataggcccaattaagtaagcaagatatactagctgtgaagtgttaatatttgccagaggaaaacataatacctgttatctgctggtattttattttttgtaaaacttaagatagtcctctgacaacgggctgcttttttcttagcagataaagctgatctgcttatttaacagcagcatgaatatcctgtaaataattttagcaatgagatgcctctgaagttttctaaaaatattagtgcctttattattgtctttttcaagagctgaatagcagtatcattatccccccgcccaacctttttaaaaaaaaattctttggctaaattagaagaaagtttatttataaaagaggtttgtagacacatggttgggaagggagtacatttgtttatatatggaaaaaaaagtgggagttaaaacatcttaaactagcatgatatacctgttaccactgtcattaaaaacatggtgctggccgggcacagtggctcacgcctgtaaccccagcactttgggaggctgaggaaggtggatcatgaggtcaagagattgagactaacctggccaacatggtgaaaccctgtctttactaaaaatacaaaaattagctgggcatggtggtgcacacctgtagtcccagctacttgggaggctgaggcaggaaaatcacttgaacccgggaggcggaagttgcagtgagctgagatcgcaccactgccctctagcctggtgacagagtgagactctgtctcaaaaaaaacaaaaacaaaaacaaaaattgtgctatatctctctggcacaggggttggctcaggtagatcatagttggaacaatgagatggttgggtgaataaatgtaaacatctgaaagatttgttcattctgttgtgaagatggtctagaagccaacttgaagaaacgtacttggccgctgatctggatgacaagagacaaatctggtgaattccacacttggaggaaagagaaaacacaatgctgagatcatgctaaccatcttaaggaaaggatttaagatggaatgtgcaatagccaaagaagtataaaagccatcagaaggtttttcataaacaccaggagaaaagaggacaagtgccatcaatggtccaataccagagtggagatttctatgtattttccttgtctcctccttaaaagcatctgataaaaactaagtacattgatgaacaattctggtttaggcaatagctcttatattccaaagaacagagacctaaatcaaactgacctgattcataaaggaaattttgttgacttatttaaaagaagtccataaccatatcttgacttcaggcaaagctggatccaactcctccagacaggccattaggagtctcttttttcatctgtcagctttgctattctctctgcaggcaccattctcaaggggctacctgaggtagaaagacagccatctgcagctctaacacaacaactctgaaggaggagatagtctctctgtagatcaggaaacatcctggagtggatgttcagcacaattctcagtagcgctgattgattcagcctggatcacgtgtccacttctgaaccaaccttcatggccagacaggtgcagtattttttttttttttttttttttttttttttttttttgagacagagtcttgctctgtcacgcaggctggagtgcagtggcacgatctctgctcactgcaagctccacctccggggttcacggcattctcctgcctcagcctcccaagtaactgggactacaggcacccaccaccacgcccggctaattttttgtatttttagtagagacggggtttcaccgtgttagccagaatggtctcgatctcctgacctcgtgatctgcctgcctcggcctcccaaagtgctgggattacaggcttgagccaccgcacccggccacaatattcttatagactaaaactaggccacaagaccacccctggaactagacagtgaagtcaagtccacccagactccataaataaggataggtgaagagagagtcctcaaaggaaaatcaaggtgctgttaacagggaaagagaatgtagatggtaggcacaattacaaactgtctacgacaacttcgagttctaataatgatataaactttcttcatcttcttagatttccagggaaagagaaagaaaagccttccctttgtgtattctcctgtttatcgttagaaagaatagatctattatcaaacttaaatttgctgccattatttgttatgtaaaaggagaaagaaaattcactttgtctattggttcagcatctttgaactatcccaggaacccagatgatgtcactgaattattcatgagaaattatcagacctctggaatttatttatataggcaaatgacattttagttcacctcggacctagcaattcaccccagaacgatctgagtacagattgtctcagcaatactctggggacaaatctgatccataaaggttgtagggatagtgaaagaggagggaacaattcaccccaggagaagcagtagaattatttgaaaggactaaagttgctctctttctttacatagagttgctctgtttatatcttcatggattattgtcttgtgacaagcacatagtctgttcttaaaacctttagaaggtgagatggggtaaagaattagagccattaaatgtttgtatccaggccaggaggggtggcccatgcttgtaatttcagcactttgggaggccgagatgagaggatcacttgagcccaagagttggagaccagcctgggcaacatagtcaaacctttctctatgaaaaataccaaaattatgggggtgtggtggcatgcatctgtggtcccagctacatgagaggctgagacaggaggactgcttgagtccaggaggtcaaggctgcagagagccataatcatgccactgcattccagctcgggcaacagagcaagaccctttctccaagaaaaaaaaaaaaaaaaaagtatgtgtccatagactcctgcagttgggctgctgccacacgatgggcaatcccttctcagttgatgaaccttcttgagctctatcccaatggttccctcccagtggctgactttatcaacacatcttttgatttccaaaaacagtggaactgaggattggaagcaataccaaggcagagaaaaaaagagagaaaaaaccatgtctatacattgcgtgggttttagaaaggcctgaagttttattgaacttgatactggtgaaacatcaatgccactggaagagttgagattttgctcacttagatttcagcaagtagtaaaacaaaaagaaaaaaaattgagaaaagaagaggacaaaataaactgaatttttttttttttttggttagtggctttggcccttttatatttcagtgtgtctttcacaggaatttgttgacatataagctatatgggagaagatctggactatacaacatgtgagtgaatttctagcctttaaatatagcataaatcatttttgaaaggaagcaacatgtttacaggcagtccccaacatagaaataaactgttccagaagtccatttagaagctggcaatttagaactaggaattgatttttcccatagggaaaaaatatatatatattgtttgttaggatcccaaaccagcctacaaaaacccactaaaatccagtaaccttgtgctaatcccagaacaataaccttgaagcagaaacagggagctatctaaccccctcccttcttttctggacacatttttttgggatactctctgggcccttcccatctaccggtctttaagtctgttgctccagattccctgaccattaattcccctacctccgcatcatggcaccccacttaagcccactcctcccctaaagcattcaggcattcagttacttctctgccctgtccctcaacagagttaccattctcagtacagatagtctcagcaatactctgggggacaaatctgatccataaaggttgtagggatagtgaaggaggagggaacaggagaggggctaatggaatgtactcccaaacagtagtgttagagctattcctgatgctctgttgctactacactagcctctggattctccagcgcttctgtttccacgtatggagcccaagcttacacagagctccctgtctgacactgcctgtgggcagtgacctgatcccaagagtggatccgatttctccagcaaactggccctttctccaaaggaagccttttgtttctgggtctgccctctgtggcccaagggccagtcgctacaactaacatgggccaggatgcctcagctctgcttaaaaatctgccctgataagatagctcttctaaactactcctgtccactcatcctgtcttttgaaacacacagatgtccagagttttagaactagtaatttagcagatatgggaagcattttagcacaggagactctgaagctaggctgcctgagttcacatccaggctgtacccattactcactaggtaaatttgggcaatttattttacctgtctcctttaaaagtgagagaatagtactgtctccttgaagtactatgacacacacatgattacatgtaaagtacttagaatagtgtctaaacatgtaggaagtgtcaataaacaagaatttttaaatggtacacatatcaagttttgaaataacacattcaattggccagacaacccttctatcttagttattattggagctccttagcctcttcggttattccagagcccttggacattatatagcacacaaagccttgagggtggccttcacatcctgctccctctggttaccactgagatgcccagggtcacttcaggtggtaactgtcaagcttggtcatcaggcacttttagcaaattccattggtccaaaggtcaatatctatttccctctctcccacacacatacttttccttcaaaagtacattcctttcatccctgaccctgggggcacacctaatctctttaatgagcttatgctaaaatcaaagaccagaagaaagttgacttctagcagcttctgcctgcagctctgcaaaaaaccctgaagcaaagaaataccagggtccagttaagcgcttaaaataggagggtgagatacaaagagaatatatacaaattatttactcaataaattatactacaaccagatcgttaataaaaatggcatcatttactcagtgctgactctgccttatataagctattccatatactagctctgtgaggtagatatctttaatccagttttatagatgagaaaacaaaggttccaagaccttgcctcatggccacacaatcattagcaaagctgatttccaaatctctactgactcccggtgaaaagagaaaggaaagctcctatggctggtgttgagatacttcttaatataagatgtttgaaagaaagaaaatgtgtgaatattcatctataagcactatgaaaactgtcttctatctttgttgaactactcttgaattatcactcctcttaatttgtttttgaacccaataatattgaaccaaaatcaaagtgtggtgttgttttatcagtcctctttcaaagtctaaatgaaatcattctttttatgctgtaatcaaataagttacccatctctggctcaaacccaaacctaaatagcaaagagcagaaaaaggaagttcaggaacacatgatttttccatagtatgtcaaaaaaccctatgctatacttccattagagtgaaaaaaagaactctttctgcttttaatgagcaattaattccagtccaggatgtcgagtttagaataggttaacttcccccaaaccacagccgtttgtgttggatcatggttaaaaccccaaattccaacttctacaataataacattcttttcttctactgcaatgggagaaatgaccattttatgtaacataagaaaacctatagcagaaacccctatgaattccagatttcttaaactgttctcaaagctgtttaaaatcagttgggtacattttattttagcagtgcttaaatgttctaaaataaactttgggtactaaattaaaaagtgaagatgtctggagtcgaagatatgaatatctatctaactggtatttatagcacatgtatcacttaaatttgacaacaattaaaactccacataagccatgtttgtgttcagatcctgtggcctgggatgtcccctcacacagcttcctgactataaccaaccaatcaggtcactacagcggccatcttgttctttcagtttaaggaaatttttgactgagagtcgttctgagatttaacatcatttggttcttattaagtagtaactagtctggtgttgtgatgggaaaaagaaaattcacagaaagcttacctctgaaaggaagacagaaagcacacttgaatcaaagaaaaccctaaaatgagaatgatcactacggtaatattggaattgccattctccacaagaaaaatgaccacttttgaatacgattgtaacgacacatactaacgtctatgactttccagccctcctgtgaatctcattaatgtctttgtatttcattctgagccttgaaatcacagtgctaaattttcggagtgtttatgaaagagtgcaaaagttgataccactgaattttagcgaggctaacaggaaaacttcccatttactttagtaaatgatctaagaagaaagaatataatgttgctgttataaaccactgagaaatagtctcttttctactttccagataaggcttctgtgaagcagtggagtatttagattttatctccatgaagcttccttcaaatgatcattccgtgtcatctctcactcacagacatagctccattccctaagcagcaaagtcaaagttgcacatgagagaaacgtattttctgcaattttccattccttcgttggtttttttcattcagtgaatactcagcaatttatgaatgcctaggaaaatgtacatcgagcctgacagttgtatcatcaacacttacctacaaggaaagaaaacttgtttggtgtatgtgtgtatctttaagcctgtgtgtgtgcataaagttgtgtgatttgaagtttctcctttacagaaacagaaggaaatgttgtatgagaaagacaatccccatcatgacctggtgtcttttctttaatgaaccttctggcccactctatagtattagatacccccaaaccatgtggagacacctccttttttctcttttgttttcccatgatcactaattggcagagccacagcttgtttctcagtagcaaatttattttaaagtttttatatctatcatctactttttttccttctttttttttttttagtatgaaccaagtttcctgttttctatgcaattccctttgcagtaatttcccagatttcaattgccaggcgtgcttcagcagcaatgtacaatatgtgtatgtggttataagggaatcagagactctcatttcagaggaggaaatcgtgctctcacaattaatgtgaatgatagcaggaagcaatctttaaagtagtacttgaattgatgatcagaaaaaaacaaaacagaacaaatcgctatgggctttaggaggttgtggctttcgtgtggttccagaactatgttgccttttcccaatttaagaaaatggatagctttctcctttctatgtatggatatatatatataaggttaaaaaatctaatccctaaatacatgatgatgcggggaacagatgacaggcaaacaggaaagaactgacattttttatcaagcattcaaattttcccctttgttggttcataagaaaatttgagtaccttcccatttagaaacttaagagtttcctagctttcttaaagattttatctgcaaaataagaagaaaacctgttaatatcctatcatcaattaaggaaaagaatagtcattttcacgtatgttctgtcactttggccccaggattggagaacagaatttcaaaatgtgtggttccttagtcatgcattcatttattaattaatgtggtagacctttactcagtggcaaccttttgccagacatttacttgactctgaggaatcgaaagtgaataaggggttcatgtctgctgggaaaggcagacaggaaacataatttcaaatataatgagatatttaggagtagttatgcaggaataaattgataagcgaatgcataggaaagagagactaaccaagaattaacgagatagatttgcttttatccctgtgaagttttcccttgtgtgttcagtcttcccttttgtctgcatttagggctgtctgtccgcctccaaagtaagctactaaatctaaacaattgccctttgtaatttcaaaacaaatgtaaagtggcttttatcatatgtttcatgatgatacttttctttatgcccaacctctccttttgaggatctgagcatttctgcatcacactgtcccaattaccaaccaagatcagcccgagagagtagattttctaacaactgtgtgtcacaacttattagatgataataccatcaattagttggtcactcttatcatttctaaatgattttgcataggatatatcaaagggcatagcaggtagtcaaggtgggtattggtacagtttttgtttcacatccaatgcaggaacacacacacttacgtttggtcatgatgtaaattataagtcttcctatgagttatgattttaggaggctgaaaaactctggtttagaatttaagtttcatatctgcttatttactgtttcacttataagaacccacatggtgctatttcacattaggaactaaaaaagacatttttaaataaacattattaataaatcttatctgaaacacataatgaatggcacatagtttgcttttcttgtttatatctacatatcaatacagatagatacatatggatagaaatataaagatagatacagacacaatttgcatatatttaaatgaattttagtttaatagtcaatgatttatgaaactcttaaataaacatattgcaagaagttacaactacagccagaaatatgtggatatacttggcatactccaggctttctttattctcctgaaaattacttcttttattttatatttaacaagtttttatgtttttattatttttcttacagttctttttttttttttttactttaaggtttgagggtacatgcgaaggtttgttacataggtaaactcatgtcacgggggtttgttggacagattatttcatcacccaggagttaagcccagtacccaacagttaccttttctgctcctctccctcccccgaccttccaccctcaaatagaccccagtgtctgttgtttctttctttgttttcctaagtgctcatcatttagctcccacttttaagtgagaacatacagtacttggttttctgttcctgcattagtttgttgagggtaatggcctccagctccatccatgtttgtttgcacaaaagacatgatctcattcttttttacggctgcatagtattccatgctgtatatgtgccacgttatctttatccaatctgttattggtggagatttaggttgattccatgtctttactattgtgaatagtgctgcaataaacatttgcgtgcatgtgtctttatggtagaatgatttctattcctttgggtatatacccagtaatgagattgttgtttgaaatggtggttctgcttttagcttcttgagaaatcaccatactgctttccacaatggttgaactaatttacactctcaccaacagtgtatgagtgttcccttttctccacaactttgccagcatctattacttttttattttttaataatagccattctgatgggtgtgagatggtatcgcgatattgagttttttttaatgtgcttgttggctgcatgtatgtctttttttgaaaagtatctattcatgtcctttttaatggggttgtttttctcttgtaaatttaagtaagttccttatagatgctggatattaaacatttgtcagatgcatagtttgcaaatattttctcccattctgtaggttgtatgtttactctgttgatagcttcttttgctgtgcagaagctcttaagtttatttagatctcatttgtcaatttttgctttcgttgtgattgcttttgctgtctttgtcatgaaacctttgactgttcctatgtccaggatggtattgcctgggttgtcctccagggtttttgtagttttgggttttacatttaagtctttaatccattttgagttgatgatttttgtatataaggaaggggtctggcttcagtcttctgcatatggctagctagttatcccagcaccatttattgaagagggagtcttttctccattgctcgtttttgtcagctttatgaaagatcaggtggtcataggtgtgcacccttatttctgggctctctcttctgttccattggtctgtgtgcctggttttgtaccagtaccatgctgttttggttaccatggccctgtagtatagtttgaagttaggtaacatgatacctcctgctttgttatttttgcttatgattgcctttgctatttggtctctttttggttccatatgaatggtaaaatggatctgtaaattccatatggatctgtaaattgctttggccagtatggccattttaatgatactgattcttcctattcatgagcatggaatgtttttccatttgtttgtgtcatctctgattcctttgtaattgtaattgtaatctgttttgtaattctcattgtagagatctttcacctccctggttagctgtatttctaggtattttattcttttggtggcagttgtgaatgggattgcctttctgatttggctctcatcttagctgttgttggcataaaggaatgctagtgatttttgtaccctgattttgtatcctgaaactttgctgcagtttatcagctgaaggagcttttgggttgagactatagggttctctaggtataaaatcatatcgtctgcaaacagagatagtttgacttcctctctatttggatgccctttctttctttcttttgcttgattgctctggctgggacttccaatactctgttgatcaggagtggtgagagagagcattcttgtcttgtgacagatttcaagagaaatgcttccagtttttgcccatttagtataatattggttgtatgtttgtcatagatggctcttattattttgaggtatattccttcagtacctagtttattgagagtttttaacatgaaggggtactgaattttatcataaaccttttctgcgtctattgagataatcatgtggtttttgtctttagttctgtttatgtgatgaatcacatttattgattttcatacgtcgaatcaaccttgcatctcaaggatgaagcctacttgataatgatggataagctttttgatgtgctgctgggttctgtttgcaagtattttgttgaggatttttgcatcagtgttcatcaaggatattggctttaagctttgttgttgttgtgtctctgcctagttttagtatcagaatgatgccagcctcatagaatgaggtggggaggagtttctcttgagagggtatatgtgtccaggaatctacccatctcttctaggttttctagtttgtgtacatagaggtgttcatagtagcttctgatggttatttttatttctgtggggtcagtgctaatattaccttcatcatttgtaattgtgtttatttggatcttctcctttttcttctttattagtctagctaccagcctatctatcttactaatttttttcaaaaaaacaacttctggaatcattgatcttgtgactggtttttcatgtctcaatttccttcatgtcagctctgatttttgttatttcttatcttctgctagctttggggttgattcgttcttgcttctctgattctttcagttgtgatgtttgttagtttgttaatttgagatctttctgacttttggatgtgagcagttattgctgtgaatttcccttttaacactgccttagctgtgttccagagattctggtatgttgtgttttgttctcattagttttaaagaactttttgatttctgccttaacttcattatttgccaagaagtcactcaggagcatgttgtttaatatccatctaattgcaagtttttgagtgatgtcttagtcttgagttgtatttttattgcgctgtggtctgagagtgtgtttgttatgattttggttgttttgcatttgctgaggattgattcatatcccattatgtggacagttttacagtatgtgccatgtggtgatgagatgaatgtatattctgttgtttttgggtggagagttgtatagagccctgtcagttccatttggtccagtgttgagttcaggtcctgaatatctttgtaaattttctgcctcgatgatctaataatgtcagtggagtgtaggagtctcctactattattgtgtgggagtctatgtgtctttgtaggtctctaagaacttgctttatgaatctggctgctactgtactgggtttatatatatttaggatagttaggccttgttgaattgaaccctttaccattatgtaatgcccgtctttatcttatctttttgatctttgttggtttgaagtctgttttgtgttaaattaggattgcagcctctactgttttctgttttctatttgcttggtagattttcctctgtccctttattttgagcctacaggtgtcatttcatgtgaaatgggtctcttgaagacagctgtcattcggtcttacttttttatacagcttaccattctgtgcctttttaagtgaggcatttagcctgtttacattcaaggttaatattgatatgtgtggatttgatcctgtcatcatgttttagctggttattatgttggcttgtttgtggggttgctttatagtgacactggtctgtatgtttaagtgtgtttttgtgttagctggtagcagtcttccctttctatatttaaagcttctttcaagatttcttgtaaggcaggtctggtcgtagtgaattccctcaacgtttgcttatctgaaaaggatcttatttctcctttgcttaggaaccttagtttagtttagctggatataaaattcttggttgaagatttttttctttcagacacttgaatataggctgccaaactcttctggcttgtaggatttcagccgagaggtctgccattagcctcgatggtgttccctttgtgggtgacctgtcctttctctctagctgcttttaacattctttctttcatttcaaccttggaaaatctgatgattgtgtgtcttggggatgattttcttatgtagaatcttgcaggagttatctgtatttcctgagtttgaccgttggcctgtctagcaaggttggggaagttttcatggacaatatcctgaaatacgttttccaagttgtttgctttctccccctccctttcagggataactgatttggtctcttttcataatcccatactttccagaggttttgttcattttttaaattgttttttctctacttttgtctgactgtcttatttcaagaatcagtcttcaagctctgagattctttcctgatctttgtttattctgctgttaatacttgtgattgcattgtgaaattcttgtattgtgttattcagctctgtcagacccattatgttctttttttggactggctatttcatccttcagctcctctatcactttgttgtgattcttacattccttgaattgggtattgccatcctactgaatctcgatgatcttcattcctatccatattctgaattctatttgtgtcattctagccaattcaacctggttaagaactcttgttagagagctgatgaggttgtttggaggacatatggtactctggccatttgagttactggagttcttttgttgcttctttcttatctttacatgtgggtgttccatttactgcagtgtagattgagtacagtcagtagacttcttttctggatgttttcactggactaaggctttgtgcagggtctttatttgaagctgacttcttatctctggtttcagaggtgggtatgttagcagggcatttttggtgttgaagctttggggtgtgatccagtaggtggcacttaggcttattagtcagttggtagactcttgcttggttttgtggcttcccctgtgtttcctcatcattgcagctatgttccctctcaatgctctgaaagtttgggttctctcccctttcagtgctggctgtagataatggcttggcactcctggactgcccactgctgctctggagagatctcagtgtttttgttcctcccctaacttagaggcaaaaaaggaagggaccttagtagtgattgtggccaagggtcttttgtttgtttgtgtcccgaagcctctgctccagagagatgcaggtcagtaatccctcagtgcaatcagcccaggatggggagggtctgtgctgcaagcccaagccagggattccttgtctggtgataagtagtggtggatatgtgggaaacatgggagatggactgtcctcctctccttgggtcgactacagcttgttggaggtgtgataaagcacttgggttctttgctccttcatcagtctaagggtagcaagggtggttccactgcagaggcagtggcagagaggctttcagttgctcctggaggctctctgtccagggagttgccgagttgctactggctcaatagctcgggccgggggtggctggaggcttaggcctggaagacaacaagtttttatcataaattaatacatgctctaaaatgcttaggtaattggtaaaagtgttaaaatgaaaatgtaaattattcattatctgaccacccaagaaatgaacactgtttatgctttggagtattttctttctatacacacacacacacatatgcataacatgtagtaattaaattgggaaccttctgaatatactatatttaagtcatatttttttactttgttatattttgaaaatttctcatgacattaaacaatcttcaaaactgtgaatttaatgtttaatgcatagtattttctagaaaggatattaagtaattggttaatcactttaccattattggacgtttaagttgtattcattgtttcttatcataagtaatgaaatagcaattagccttacaaataagcatttgtattattagttctttatcataaatcaatataagatactaattatctagtatgaggcgatgaaatttatttaaaatttggcacatattactcatctttcctatgaaagttgttaagtttatattcttgccagcagcatattcattaatacactgaacaaatactaatggtctgttttatacagcttttagagcaaccctattaaaattgagtgtttgtatttttcctagtattaccaatttgatggcaaatatcaattatgttgttttcatttcttaattacaactgagaataaacatttcataggtttattggccatgtatatttcttctttttatgaattttttattttttctattacaatgtttgcctctgtcactcctaacttgttaaagttcttgatgtggaaagaatattaagcctttactgtcaaatttcattcagggttttttttctaacttcgtcaatagactctttaactttgtgataccttagagcttaaggacttttatttttgtgtaaacaaacctgggatattgactagttttttcacataccatttaaacatctatcaagatgattatatgattttttttctttttctattaatgtgagagttcatatgaatagactctaatgttgaatagcccttgcagttctgaaaaaataagtctacacttacatgctgtctgttttgtcctttagagagacctgggcatggattgctaatatttcatttgtgattttgtatcttatttgtaagtgaaattgataagtacgtttgtttttttgtttgtttgtttctaactttagctgttttatacagaagggttacattacctttgccaaatgatctggctagcttttcatctgtttctatgctttgtaacaatgtctataatgtaggaattatctctttgtaaagattttaaataactcatccataaaaatatctaacttgatcctctttcctgggtaattctttgacacctttttcagcttttctgatagatacagatatttggaaaaggagattatttttttcctttactgaattttggaaatctgccttttctgtaaaattatatctctttgagatttttaagtttttagtgtattttatctttaccaaataatatatttaataattattttttgttttcatttatttttacttcattatttttacatttatttttacttaattattgtttccttaaaaacaaatgaaacctattttttgaattattcagctatttaattttgcttttgaacttagtttaggtatacttctggaagtgataataagctaatgttctttttttttctaagtattctaaaatattaaagactttatttttcctttgatcaagaatgatttatatgatctttaaatcaaggaattaggttttttatttaagtttttattattaatgtatggttttaagctctgtagtcaaggacagcgacgtctcccatttttgcctggtggcatttattaaaagttggcataatatatggtaactattgtcgttaaaaaaaattaaattaattaaaatcaaaataatgatttttctgtaaatatgtattctctaataaatacttactgagttcctatagtattataattccaggcaccatgaaggtgctggaggatagcaaagagcacaacagacaaaaatatcttggcttgtggtactggcacactagtagatgataaatatatgcataccatatttccttaaatatgagtcagcaccgattattatacacacaataaatttttactaacagcttttcaagaggagaacaaaaaagaggaaaccatcatattaaatgtaaacttttccattaaaagacatttcaattttacaaatatttaggtatgagaaatgtgtttcttactattgagaaaatatggtaaaacaatcttattaattatattgtttttgatattgtaaatacttatttgtcactttttatctgttaaacacagatattaggttaaaattcccatatactgtttggttctgagggctttcagtatcccttttttcttaggtctatcacttattataaaagttgaattgtgccatttgattcattctgaggctttttcttccaaagaaatgtttaactcatttctatctgttatgataactgggattcttgtcctttctgtcatcttgttttaggcttcctgttttatatacccttttctgttttcttacccccgtgtactatatgtgtgtgtgtgtgtgtatatatatatatatatttatatatatatatatttttgagatggagtctcgctctgttgcccaggatgcagtgcagtggtgcaatctcggctcactgcaacctccgcctcccaggttctagcaattctttgcctcggcctcctgagtagctgggattacaggcgcccaccaccatgcccaactaatttttgtctttttaatagagacggggtttcaccatcttggccaggctggtcgtaccatattttctttgatgatttttagtaatttcagtcatactggctttataaatattatttagcctattttctctatcagtcaacatcaaaaataaataatcttttgagtaccttacatgttaaagaaacaaagtaacgtgactgtgttatcaaaactttcctttatactttttaacctgtggtatttaatatacagttgtgtttctaaagaaggtgtatatttttaaaatatttttaatgtgacatagatcctactatctagggattatatgcagtgtttaatgccagtccttccttgctatgacagctccattgctcagttctttattttgattcatctctctgataacctttttttttttttttttttgagtaattttagttcaggaagaataggcagtatatttttaaatccttaaaatctgatgataatattctttatatataaatctaaatacttcttataaggatgtctggtggtttgaagtttgaagtacgtaacaaatttttttttacctcaatgacttgactgcttcccaaggtttttttcctgaaaattctattatctttaggtttttaatattgatgaaggagaaatctgaggcttatctaacttttctttctctaagtaacttgttttctctatctggatcttaggggcttctttattcacgatattccaatgttttacctacatttgtcagggttttggtctctgcattcattttgccaagccttttttgtgttctttttattgatggcttcatgttggtttctgctgttttcttgcttgaaagcaccttaaatgaggtgattgaagtctccttgattctcatcaccttacatctgaagatttgtagaagagtcccctcaaacctcaacatcaggactgtctgatattaactacacctcctgtttagaagttcagcagctgagaggacaggagtggagccaaaaccctcaacaatacttggaggagaactttgcatctgcttagttttgcaggtgcttttgctgaaatcactggataaggggagagctttctatgccctgacttctttttggcccagccgtctcgtcctctattgcctgtggctgtgtctgcccttcaccttcatactattgcccatctaattagaagagagagcactttctatcttttagattttttccgctgttacagctacttggagaatccaagactttccaggtgtgctgttcagaatgctgccacttccaacataacaaaaagccccatgttaatctcatcagtctcataacctctcctccagcctcacccttctaatgaaaggcttagcctcctctgcctgctccccaggagggttggttttgagctggcaccatgccctcctttccgcccaacccatggcactatttccaatacatactcctcaatgactcacactggtgcaagtttcacctgttttatatgcggttggtcatttcagccagaatctgggagatcagtagtaaattgtctatgctcacattgccatttttattcagaatttgatacccatcaaaacacttaaacctcgccagaataagagatttcttagtgatgaaccatggcaagaaccaggacagttttattgcctcacaaaggctattttcttagctgcaactttcttattcacacacagtaaagcaatgcctagctcatggtatgactggaaaatactagggcttttttcccctcctacatggttaactcctaattttcctttaaatggtcctgaaaacaagagacatggtatgtaaaacttccaaattggtttccttaccactccaagagtggggtctctggaaaatatagtaacaaagctggttttctagtcacatgtcaccataacttcagtagggctaagctggaaaggccaaagaaattcggaggattaagaggtttttttgtttttgtttttacattgaagatgtaaaaaataattacaatataatgctgggtgttatgtatgcacagttacctatgaacacaaaaaggtttaattttttctgtcaacgtgcattgttgtaattattaaagataaaaaacaaagttcctgctataaacataggggtattggttgcatgactttattagctcctagactgaggtctattgtgcggatgctaatctaataacagaatcatatttataatacagtaggaaattctctctgcaggttcagaacagtacacatgagacccagcattatcgaaggcttatcctttctcacactgaactaatactcacccttcattttggtgacaagtccagctcaatgagaatctcgacaaagggcctgactctctccccttccagccccttcgctacagcagatatgattacttggattctgcctatgggtccacgttgtgtacccagtcccgggaaggtgcaagaaaatctgatcctttttcaaaaatcatcttagaatcgaaccagtcttactctgattttcatgacacccccaccctgcccttgcttctcgcagggtctggggctccatgtccttatcagtatcagacttccactgaggctgctgtctccagtacccccagaacactaggattatagtttctactggaattccctaaactacattgctcatccatttcaactagacccaactgcttgacaactggtcatggacaatcttgaacatagattctgtttcacagtttgtcctaatctctttcttctcagatccatctttttatccctgtccctctgtgtacccatagtcacatctgggtgtctgtggtgggattgtggatgtgcacttctacccactgtaagcagctatcacaggtctggcccactcaactgctcccctgatatctgtagtgacagaaccttgccttcaaaatcaaaagatacaaaggtgattccagtattgccaggtagagttttacaaagagtacttgcctttgtggcccctttttctaaaattttggtaagcagatatacccagaagtatgccagccagaaagtctgcagcagctctggggcctcagtaacataagcacaactctaacttgatagcaagctcaaccttgatctccaactgctcgtctgctgtttatggcacttactgcctggccacgttttcatttttgacttggaaacaacaaggcagatgccacattccataccactaccttttttagttctagtgaagaaaataatgtaagatggtgaattaattgacatgaaaaaaaattaaatgtacaagattaccacttctgcttagtgctttgtctttagtaattattgcatttttgtatagttaacgcttaaggtatgcaatggccaaagcacaattttattgcctttattttgctgtttagaaatggcctctgggggtggaagggagtagaggagaccaatctttatcaataatgggtagtaattttaaaatcatttaaaatgatttttgtactcacatatgttcaaaccccctttccaggtaaattctatgtggggacacaagtggtcactgagataccacttggcttttagacagtgaagaagtcaaatgagaggtttgcaggtataaataaaatagcacaagtgtagaagcatcatcagacacagcaagtgtaactataatgaaagttaccttgaacaaatcagttcccaggatagcattcatttcttattgttaaatatgcttgatgcagtgaagtatggcttccagaaagataatggagcagataattaaacactctatttggaaacacaaacacagacacatacacactgcagggagtgtgggttagcacaaatcttgtcagtacaacctaatgaccttctgtagaccaggcctttgacaaggggaaaaaaatagaaaaagtcattttttttactgcagtaaggattttttataaaaattctgtggtacgtgaccaacatcagtaaaagagaaaagagcttagctcttacttcttttatataagtggactatggttcgaggttgatgataaatcactaatgtttgagtttcagttggctacagcatactaagtagtcttttctgtggtgacaagtgacaaggggcagttaaagatgtggctacctcaagttctcctctgccatagaaaacctcccagaggtcaaccattagacccctactgtttctatgtcagtagtgtaaggccaggcaaaggcaataaccttcatcagggtctgtctcaacctcccctgcagcctcctttcattcttcgtatccgatgatgccattatcatagagagtacatacctgataaatgcttgttgaattgggcagcattgtttctaggtctctctcaggaaaaggaggaggatcaagacataccatattcatcttaggagtaacacagaagtttccccagatacaaggtccaattctctctactgtaaagcctagtcctcatctcactacatttttcaattagctgatgacacctacatgatgcatcagagatggatagatggattggctgcttttgagaagttactcatggtccatcatgcatcaggattcttactcatccacagtcccctgcaaacagccagctattatagtcagcagccaatggtctatgtgagtgatccagaagctaggttagacagcatcccattggtcttcctggtaagaggttgtgctcacatttcatacatctgtacagtcacagtagcctctcatgaagccttctccagctgctccagcctcatctccctctccctgtcagcacttccagtctacaccaggaagtaaaacttaaccacatcctacctggtaccagcaaacaacttatttaagaagtcatgcacatttgagccctacgttgtgcccaacctcatgctgagtactttgctgcccctcaacaaatgtttgaattcttgatggcccagatgggtaactgaggcagaaacatctatgagtctccaaagggaaagcacatataaattgagacctgtgctgtattctcatctccagcctcttctcttcgtgtcagacatgacacaatcttttttttttttttgaaacagagtcttgctctgttgccaggctggagtgcagtggcacagtctctgctcactgctacctctacctcccaggttcaagcgattcttctgcctcagcctcccaagtagttgggattacagacatgtgccaccacacccagctaatttttgtatttttagtagagacagggtttgaccatgttggccaggatggtctcaatctcttgacctcgtgatcagcccacctcagcctcccaaagtgctgtgattacaggcgtgagccaccgtgcctggccaacacaatcttaaatactcaacaagctagcctaacgaggaatgccagcaaataggtcattgctaacatctcttttggtgtctttctttgacaatgttccaagtggctacctaacatgctggcaattatgcctatagggtgagtacctcatttaagtatttttgtagattaagtcaatctatgtttatgaattttgaaataatggatatggctatggtggcatgaccctacttgagcattaaaaaaaaaaattaacttccaacatattttaatgcaaatgttacctttgtaagtggatgacctgaaaagaaagtgtttccatagtaacctaagggaacacataactgtttatcagaacttctccaggaaaagagcttggcatggactggggatctgctttgatgtctgctgaaagaaaatagctgacagcattgtgtgagaaaatggttagaagatcccactttatttgtagttaatttagaaaataaactttcataatgaactgctgaaatacacacttgaaacaaccagatgatccatcaggatattttttaaaatgtaatttgtcgggtgtgacaaccaagtcatcagtttaagagaaacagattagggaagagatcttacagcaggtctttgccaccatttcactcattttttttctgtactctgtgttcttctgtaggaatcactaggcctttcagagctcttagatttttttttctttgcttactttttttcctttttaacttcagaaaacgttacgtaaaagctgccctttgggaattgagactctacattgtgaggctatcaccaaaaagaaacctattgattgattatacttcactttctttactgacacggctgtttgagttagtagctttttggacatgccattaggtagaaatgagtttgacatccacaagccactatctggttatctgctggttattttccctttttcttatggatgtaatatctacttaaagaaaagctgatctacgagggttttcttttttcattttttaaggttcatttgagtagagaacagatgcatacagttttgagaagtatttctttgaagcgcctttttagagtcagctcactgacaggtccatgcccgtgggctctggtgtggacttagagcaattacccacctggtctccatctggtagcatgaacgaaaaatcataacagatcatagagaaactataccaactgccaccttggtataggcaggcaaagaaaggtgccacccaacaatgctgtgaagagtaagaaatgctatccgtagggtatgcacattcccaccacaagatgcaaaagagtggcacacaggagcatgtggaaaggaaataatatgcacatctaaccttacagctgcaactcgtgaaatagtaaaccaaaagttctctccgccacatttatgtttctagtgaagtttggagaaaacgtattatcctaatatgcttgagacctgtcttttgctacccactaccacccacaacagggttaaacaagacttgaggacttttaggtgaggagtagatgccaacatcataaggatgttgatgtaatttacatgtaatgccactttgtagtcagttcaattgtagcaaaaataagggttttatggttgctggaaaataatttaaatgtttgttgattcgttattgtctttttgtttttattttctccttttctgctttgtctgctttcttccagaatacagcgtgctctggttagtacaatagctaagggttcagaatctattactacaactgccagagatttgccctcttcgggtaacacccttccatcctgaggagctagagaatccgagattcagagaggggcaaaatgtctctggcgtgtgtgtggttagcagggtaagagctaacttggattcctttctttcataatcccctacaaagtgttgcacatgcttccactgaggactaaagcaatgaaaaatatcttcctggattggccacacagatactcatgctggacgattcaagaagatgaaatggggaagaaagaaacgatgactctagaggcatgacccacctggataagaattgttgtaaaggaattatgtagtgcaggaccattagaaaatgccagagtgggaggtgagtgaaagatgagatgtcaaaggagaggggttgtgatctgaaaggtaagatttcaatatctgtatgtagactgtgacctttgcaaaagactttatggaaaagccaacaagagcctaaacgtgattgctgtggaagaactgaagtgcatactctctgcaagaagatataatattgtaaattcacttgctttttcttcttccaacgtatggaagggactcaggtttttttcaccataatttatactaattagtctttccacttaaatcaagaggggaactgcaaatgtggccattgatggtctgctcctcattagagacaattaagagttagaggaacaaaaacacatcataggattaatgatgagaaaagccacccagagagagaaacatgaagcaggaaatgatcttattgagctggacaaaggaaactgatagcctgcaagatcagaggctcttggagctgaggtctaaacagtctaaagaagaatcgcctgggcatgcaagccttcccctgctgtattctcatctgtatttttcatatctcctgtcatattgcatttattaagaaatgttcttgctctctaaatccaattcattagtttccctccatggataagagggatggcattactgctgagagaaaaataagtactaagctaatcagccttggtaaattccagtcttgcatgttattgtcattgaagctttatgtagcattcagacagggcaccgagacacaggagagagactggatatgaaatgtcctaacaccactctcagacccctgctgcttatatcattttatcgtcttccaaagagagagggaggagattagggaacatttaattgccttataaactgattgacaaattggtgatctgatgcatatggatgatctttttagtgaaatggttcagaagctgctaacagatcatcaggaaccatgatttgcacgctctccgcagagttattacagagaagtggaaggatgggttgattatttattatctttccttctttctgttttttttttccttgaatgttttcttcacctccagggaaatgcattctagcagcgtgaacaccgctattaatcaacacttgtagcaataatcagtgagtgaaaaatggtgaccagaatctgcgaatgcgctggcataactgtcttctgagtgttcctttgtgatcatgccttggcattcgaacatggataatttatacaaaattaatgttgacaccttctgaggtgcaaagattcatagaagcagtgcttacttcttcatccgttaaaaaacgaagagaaattgtttctggtcatgatgagtcatattttagaggctttaaaaatatacttgatattgtcatgtttctttgtgttatgtttagtcacctagtcccatcatttttgaacacaggtgtcataaaaggcaaaactgttataagttctttgtttcagttttctcagacttactccagaaggggtgtggaaaataatcaagaattttaaaatagctcaagccccaatatccttctcaaagccaactattgttattggcagtgcttgggggggaaatggttcagagttgctggagtggcaaaacactgttacaagccacaccttacatagggcagttgtctaaattaatagtgcaacatttggctagtgatgcaattatacacaatgaaactattttgaaatttggttgccactctcattccacaaagctacatattaattcacaccatcctgtgatcaggagggcaaaatctgaggtgccaacacactggaaatttcccttaaacttcgctaagttaggatgagtttgcctggagcctaaggaagatcactaaggcatcagaccacatctttaaaaagtgtgatagaccaggactcataggagcatatgacaccagccccttctctgcgaatcattcctgtcattaaaatcaatgcaacttaattaaagcaaattatagatagatacatctataaataagatattaaagtgtgctgctgaatatgataattgctgcatatttagcaatcagtgtgtgtgttctgcttttgccaggaggaattcctttcagtggaatcaatggagctttattaaaaaccatccaaattagagggagaaatgatgagtgttataataacacaaaatcactgtttcaactttcattgcaaagaaaagaaagcaaaatatggccatccctcttttttcactcaaggaaaatattagacatattttctttaagatgtggatgttttgaatttataaattttaatttttgtattctcttctcccaaaggaaggcagaaggaaaataatgatcataaataaaacaatttagcagtgagactggtaggaggaacaccccagtgcccagataagctgttttataccgtgatgacagaagacaaataatgaagttcatattctgtacagaacttgaagatggcttattttattctcctatccaccagattttcttgtatgtgaaaattttcatgggttaattcaaaataatgaatttggaaaataaaaatccattttcttacccctatacctttattcataacaattacacttgaggcaaagtatattttttcaggctaattttaaaatacaaattttaaaaagtttttttatcatcgagtttaaacatcagtaacaggaaacataagtgttcattaaataatgaaatcacccctgtgtaaccagaattattctcaaatttataaaaataaatactaaacttacaaaaagacatagattttaacattcaatggttttgggggttttttgtttgtttgtttgttttttgagacagggtcttgctttgtcacccaggctagagtgcaggggtgcaaacaggtcactgcagcctcaacctccggggctcaagcaatccttccacctcggcctcccaagtatctggaactacaggcccacgccaccacatggggctaatcgttcagtgttttaagagatgaagaaaatcactaggcagccagccacctctaatagagtctagtaaaagcatttacaaagacttcccattctgggttactctgtgcattaatgttttgtctttgagaaggaaaagagataaaagaaaaagtgaaaaagccaaaaaaaaaaaaaagggacaagaagagacatgcatgtttaggaaagtggtttataactattatttcacttgatcaaataaatgttgatttgttgaatattttcaagggactggtcctggtgctaggaaagaaaacaaagtccctgttctcatagagtttatgtttgtgaaaagagatagacaataaacaagtaaagagtaaatatcaggccatgataatgaccaggaagaaatatcaagctgggctaaggggctgggcaagcatgctgttttctacaaagtggtcggagaaggctaagggagcaagatgcttgggaagctggaggagcagagaggagagtgagtgagaaggagaatggacggaggccagagaggtgggaggatcagaactgtggagtcttatggagtccactttttttttttggagacagagtcttactgtgtcgcctaggctagagtgctaaagtgtagtggcatgatctcagctcactgcaacctccacctcctgggttcaagctattctcctgcctcagcctcccaagaaactgggattacaggtgcccgcaaccacacccggttaatttttgtattgttagcagaaacagggtttcaccatgttggccaagctggtcttgaactcctgacctcaagtgatccacccacgttggcctcccaaagtgctggaattacaggcttgagccactgcacccagcctaaccattcttacccatagtggttatttctaattttctaagatgcatagatgatgatacgtattcctcatgcttagaaaagagtaaaaacgattggcattggtctagcttgctatgtttttctcatggcctagctctagagagtgattttcaggagagatggccaattatttcattccagactgccaaaaccagaggctattatattcacaaatttgttcaaaatcgggacacatgagtttccagtctacagaggggtgtatacagagtaaaatggagttcttttttgcatctctcttagctctacatctactgtgtagacatattgcccccataatcaaatctgctctgcccctttctcatgtttccaccagaggataccatggcttattcccacctgcgaactctgcatgaatggaaagaggaagtaacaacagccactaatcatgtacatcacagacatctaagcccggtctttcctttaacacacactccgtccttgtgcagctgtgccttagagttggccccagtcaataggtagggagggagcagagtggtggtactcagactctttatttggttcctttctccatgccaaaagaagatgtcataggacatttcaaaactaaaccatccttagagatgtgtactaacagcagtttgcaactctgttatgggatacacaaaacagcagggccactgttcttcattgtaatctgcatgtgaatattctagttcaaactccacacagtaataataccattaatatgatatttgtttgtagcataagaaatatatttccttctgaaaatattgatgtaatgggtctctttaaatcacagtatttaaataatagcccacttaaagaacaaggtattggaagacattatccagtaaaaggtttctcttccctatgaggcagtgagttcattctgccacctttataatttcctcttcctgtgcaaagtggctctgtgctctctgctttgctgcaattcctcaggcaatagccaagctctcccattgtgagaatccctgatttcaataactcacagaaattagtaattagaaacacattaaagtgttggatcatttttcttaggggctttactagtagagaattgtaccccaaatttcatttcctggtgttttctcctttctggttataaacatgccaatggtgctgtattgcattcacctggggtaggattgagacgtaatcaaggtgagcctaataaaaatgtggcagcaggcctaatgaaaattggaatggatctaaaaaccttgaataagctcactctcttttcataggttcttgcagtttggttttcctgagtatctgagaaatggcagggagtggggtcctttacaggtattagctatgagcaggtatttgaattctgattgagaattgtgaggtggaacaagcgtgtggtgtctcttagctgagttgtgtgctattggaaatgatggaggctgaattgacttttgattttttaagaaatgattcgattaacttttgaaccacctgctcctgtgtccccaggaatatcgtgaaataggctctattcctgttctttccacagcattgcattctcctgctcccactcatttgagttttgccgctctgtgaattatggtatttgatctctgctcctaaggaaagatgattctacccactctttggatgggttgttccccacggttgaccctcaaattgaaagtgatgtttcccttgtgaatgttgtaaatttaaactcagggatcatcacctgatcagtaactcacttgtgggttgttagtgtaatttatgcactgttgcttgtctgcaaagtaaaagtgagtttctcatgacccttgaggaagatactcggagagacctgtccctaaactatattgggccaatgaacaaattcaggaatgtaactctctctacttccttccaagtgacttggattaatgttggtgctattttccataccaaaacccaattacaagatggaagattttcagtaattgggccctttggatctgaaacatctcaggtcagtgcccctggggatagccttcagtaggaagagttctggggcttcaaacagaaggtaaatctgatttatagatggacatggcattacatctgtcacaaatacattatgaattggcgttgtacattttctaacatataaatcaactccccctgggaaattatccttcatcctaatggattataccataagaagttctttgcaatattcatcctaaattttcacttttcttaatttcattacattgatgagtagagttccttatatattcttttgcctacctcttagggatgttaagagtattaggctaatgcttgtaaatcacctcacaattctccaactgagcccactaaagcaatgcaaaacagtactagataataaataggtgttgattctgctcaacattcatgctatactggggcataatgaatagacccttaagtaagtagataaacattcttctccttaaagatgggaaatcatataaatggcactcaaccagaatttcaattgcttagctgccaaagttgggatttggcttctttgcatagaaataatcatggcaagtgttggtttctttttctttttttctctggttctcctgtctgctgaccccttgctacatgatgcttccccttcagactctgtacctttgtttctctggaagaactgcacttaggtgagcatctctctgaacacagacactgaggatgctttcagacttgaaaacacaatgaaggggccttccaccagtcggcagggctaaatctgggagttgcactcatttaggaaaacccatcaatggaccgatagcaaaatggctgaggtcagtagttggagatggactcactctctacctgcgcacacaacctgttgtaccctgggaaggaagccagctgtcattctctcctcatccagtcactagaactacacacacatggtcctggcatttatatgtgatcccaaactgttcaataatgtaataaaatgcatatttcatatttgcactgttaaatgcctaaatcacaaatactgtttcttgatttcattcagtagaattaatgttgccacatgaattagagcattgcattcagttgctaatagcaccttgaggtaacccagctaggataatccaagtctgttttctgtgggtagttgaggattacgtgtttctctgcttgcctatgttatgtctctccttcaagattacttttttcatttagttgatgctttattcttttaatcatttattgagcatgtgttagataagaagtattacaaagatgaataaagcaggattatttgtcctcaaagcactgatgatccaacagagaaggaaaaacaaaaacacaaaccatctccttataacagtctaggtaagtattatttacaaagacatactgaaggctctcagaaaataaaaagagaatagttctgtctgacaggcttcccagaggacctggtgatggaagagagggggagaggaaaaagcttgaaccaacgtaaggaaatgtgagagtttacagggatgaaggatggtgatactgatgaggatgacaatgatgactgtagattgtgaaaggcttggatgccatgctcaagaattagacttctctaggcattgtttctgtaaacaacaataagatggtcacgtgtgtgtacacacacacacacacacacatgcatatcatccttctaaatgtgtcatattattccagccactcatcttgtatacatatagtgtaaaaaaagacactttcataagagaaagtaagagttctctctctataattccctctctttctgtctatctgtctctcctttctctctcgtcactctctttcccaataccgttttcggaatagtatcggtgaagaagcttccgttagctctgtaagccagatctgctcagggggctcatggaaatgaactctacagggcagggaagaaatcctctccaagtgtttttgtttttttattttgttttgttttttaaccaatagaaaggtcagattcaatgtaactgcaatagtaagaatgaatatttactgacatgtagtagactatgtgtgagatgtactatgtgatttatatgcatcatatcatttaatgctcataacagtcatctgagtgggtattactaatcgcatttacagatgagagaaatgaggctcaaaagttaacttacccaaaatcacaaagtcagtaagtggtagagccagaattcaaacccaaccactatggcacactgtgtgcaggcctgagaccactgcctctgggtgttcaattagagactcttcatgcagtttccagttagaattaattaatgctggaatcagacacgcattaggagtgatggtgcttttaggattgtctgacctaccctccctgccgtgtcattctctttgagtgaaatagtcttatgaggaattcacaacacctgcctttgtcctggtcagggtagtgttgcagattgagtcagatgatgtctgagaacatgctttgatcattgcaaaaccctgtatgaatatagtatctgacaatatatcactcatttaatatgtatgtaggaactagacagcaagcacattttaaaaacaggacaggtagtttgaaaatcggtttaaccttttaggtatcatcctctagagcaggtatgtgcacagcccctccaaggccgtggtcaggggcccatcagcatccaagcttcaaagccagccattgctggtcactctatcctttccccagtgcctgccagactgttcacgaagtagcagcccagctgtcacaactgatgaccagctgttttttattttaacaatggctactaaaacccacactgaagtatcctttgtattatttcctcagtagtttagatatccggttctgaagctttgatcagatcactgaacacagttctccagacccgaaccccacccctcccccaggtcattgcacagagcaaacgtgttctgctcaagtggcatcctcagatctccactaggtggacttcacagagcagccaagtacggttagatgtgactcaggtgaagttttttcaaagccctcttagccaaagaagtatgaggctttgatgtagcctttcactagttcgaaagtaactcaggaacagaggggaaaagactcagcagttctctcctaatatccaaactttcctcattttagtatcactactcagcttgcagggaagtctgggagagggttcctagaaacccaactaaccacggactctgtgtcctccacagcatgtgagttgtgcggcaccgtcatgctacatccatgtcttggctcatgtgagacacttgggctgattttttgttgttgttgttgttgcttgctgtatatttgcataattttatatcccgagcagagttcttgattttgcaagagcataataaaaaaaaaaaacactgtgaattggcaggtttgaggttatgatttgcagctggtctatcacttcctcttcctggaagctgcagcttaaagtattttacaattatcatatttcacgggacctgggcctatatttgcatctgctcatcttttggttttcttttttaaaaaatactctcttttcacattttttggtggcaaaattgtccaacacattcattttatgtatttttctcttctgggtataaattcatatggttcaatgctattgaaatcaaaacattcaatgcaatgagcccttcggacaggtttttgagactgaaaacaatgacaaagcaaattctacccagggttgcagtaatatttctaaccagcttcctttgtccattgtcattattttgattaaaaaggtgtgtagaagccacggtggattttcaggatgcaaaaatcattgcagaaacttcctctattagtgcaaattattagacgatggaaatggtacttgagcagcaagaatgacattaattatgcgaaaagcagtcatatctggcagttggcaagcatgcattattcttcaacaatcttccatgggtttgtgttcagccagcattagaaatctaaaagcttttaattttggcaaagttttcacaggacttgcacttccagcttctagataaaagataatttggaaggaaattatgttggtgaaattgaagaattcagtaatgagttctgtgtagatgaatcaatgctcaattaaatgattatatcaaatctacctttaaatgttgacttaaaataatcatattttaaagacattgaaagtaagatgctatatatacatgtaatcagaagagcaaagtctgtgttacccatgctggtagaggaatgaagtattctgattgatccatgaatttgattaatggaaagaaatttaggacaggaattacctgtacgctaagatttagagtagactgccataatctagcttgttttcatagtttccattctcttttgcagcttttctctgtttctctgggtttttttctctttccctgtctacacccctttttccaggctcccttctctgtttgagagttttaatgctcacagaaactttgttttttttttttttttttgagacagagtttcgctcttgttgcccaggctggaatgcaatggcgtgatcttggttcactaaaacctctacctcctggcttcaagcaattctcctgtctcagcctcccaagtagctggaattacaagcatgtaccaccacgcccagataatttttgtatttttagtagagacggggttttgccatgttggccaggctggtctcaaattcctggcctcaagtgattgcccgcctcagcctcccaaagtgctgggattacaggcgtgagccaccgtgcccggcctatttttttttatctactactttatccacctgtttttttcccttcgtggcaatgagtacagccaatcagagcaatattctttgtttcattcattcagtcaatcagcatttactaagcccctgccaagtttatggcactaacctgatgataggcagagctaccaaaactgaagaaacagatatcctgccataggcaaaaaagcacatgtttggctggccagacacggtggctcacacctgtaatcccagcactttgggaggccgaggtgggtggatcacttgagatcaggagttccaggccagcgtgaccaacatggtgaaacctcatctttactaaaaatataaaattagctaggcatgatggttcatgcctataatctcagctactcgggaagctgaggcaggagaatagcttgaacccaggaggcggaggttgcagtaagctgagatcacgccactgcactccagcctgggcaacaagagtgaaactccgtctccaaaaaaaaaaaaaaaaaaaaaaaaaaaaagtatatgtttgggatccataaaatttttaataagatcaataagatcattgagcatgcataagaaggacaagataaacctggaaagttaggttgctatgggttactaaaggccttgcataccagactaagaggctgagttttttttctctagttaacaggaaactattcagtagtttgtgtttgtgtgtgtgtgtgtgtgtgtgtgtgtgtatgtatgtatgtatgtgtgcttatttggtttggttttccaaaccaggttttgacataagaacatcagttttcagaaggttatcccttcagttcttcctttctcctcaacttcattcatcttcctagaacttgaactcagctgctgcagtcatcacaaaataacttggttaatataaatttgaggaaaatgcctgtctgattccagcatgaatggtaggacaggtctgataatgttgtgactccagtaaacactgcataatgacatagccattccatccaacagtagttgtgtgctcagtaattcatcttattgtatacggttcctctcctagtccactgttactctgagcttataggaatctttcctcacgctaagcagttacataatttagattccaaatggtttcgatttatactccagatctgagttcaaatctaaattgttagactatttatagtttattttttattttgtaaggaatatgaaaagccaggactgtgtaaacaaaagaaatgtggcagtcttaataaggcataaccataaaacagatgtcatgagggtaaagctccctttaaaacattttgatagtatgttttctctgatttaacaggtttggaccaaaaatctagcatggaatctgattcattctttctgttaacttccactgcgtagatgtctgagacatctatttcattggctcagtaaatattaatgaacggactgatacaaagatgatatgccaggccttgagaatgcaatggtgccaaaaggaggcattgtgttagcactcaggaagcttacaatctgagatcttaggtaaaccaaattaatagactgataccatgtatgaataactgaaaaaaaaactgtacataaaccaggctatttttataacacatatctccttattaggaaacacttttgctataccaaaaaattagaatatatacaaatattaatgcctccagctataagaaataaatattactaggcctttggagttcagtgatatggctaagaagaccacaaaccactgagaatacttgcagacagtcacagactattttacacgtcccatcgcatcaccaccatgggttcatttgaactttccagtccttcatctcagttcttcatttaggaaacagagtgacagtaattatgtgatcactgccaacatacgagcagcattgtcgggggagaaatgttgctttggggtcagacacatctcagttcaaatcctggctttgccactgtgtgacccttaggcaagtctcttgatgatctctgaactttcatttcctcatgtgtgaaatgaggcagagatggaaatggtagcacgattgcaactcatgatactgatagtggagtgttctagagagtcctttcttttggtaattgtaaatggaagtgaccagaacttgccaactggctgaaatagatacaaaatattcagcttttccaaatgtttcttttttctatgtttggtctttataaatggaagtatacctaaaatatgctagagagcttggtcaaggaatatgctttatagagtttatcagctaaaagggatagtataagaaataatatgaactagtatatcatttaagaattgaacatattttgagggttagcattgtctgttttggggtgagtgaataacactgtcacagagtgtacaataaaacaaaacagcaaggagtaaatgactcatggaatacatccatgaaacagaaactgaatttagtaagtactagatattagcatctagtgattgatgtcactaagattacatcaaattcctgtgtactctgctcctggagaatacaagacaggtgacagatttcttaggaaatgcttttcctaatgccttttttttttcttttcatcagacctttgtcttttttcaagtatgagtttactttttagccagtgttacaatatctctatttgtaggtagacagatgggggataggaaatgaggaatgatgtctggctctttaattaaagacacagagccagagtttgctcttcaagcttgttggcaaggcacatacgcacacgtgcacatacacacacatacacacacaaagtgcatctgatagatgaagccaaatttgtaaaattgtatccacaatcatagtttctatggtaactgtatcttaggcccagacacaaacagagctggcaggagatgtctgattttattttctgctaagacaatcataacagagacagttcaggttattaagatgccatagcccagtgtacatgcagctagtacttggatggtgctaccataagatttcatgcttaaatcccaataaatactttataatttcataatttgcaggttgcttttctctgtcattctgctataaaatcatcatgtgcctgcacacagttactatattaatgaggtgttagtggtcaacataaatgtggaaatgatgcaagataacttttataaatgtgcacaggttagaagggacttccaggatgtctgttttaaccctgacatgttgcaaggaaggaaaatgtaggcacagtgtggttaaaagacttatccaagagttccttttaaaatattttatttgctgtattttttaaactagcagatgttctagactagtctataagctgaatacccagttatttcacaaaattactgaaatcaaattgtggaaaacaaacacttcagaaacaatagtttgaatgagtgtgtgttctttcgcctctctggatggcatatttgtaaatacgtagctcaggcatattataccacatattgctgaagatgaataattaaacatcctattttgatgagtttcattttgtttaaatagagcatttcccttagttcccctagaaacatatagcattttagcaaaagtcttaatattagaagatgctgaaagccaagtttataacttttagaagtttttattgtgttgattcctttaaacatcttccagccaaatctgtaactaggtaagagcaatggaattagaagaaagcttttggaaatgtggaacacttctccaaaatatctgtcatgataccaacttgaaatgaaaggcacatttcctaaaatggcatctaaatttttatactttgcatcttaatcttatgatgtgtctggcagcatgaaactcatttttttgtaatggatctaagtaagacatatttgtaaatgaggatgttatatataggtgaataagccgtattgcaactttgcttggcctctccatcacagcagctttttaatttcctcaggaaaattggcttggaggacataaattacaagattggcaaaaaatgtgtcctaacctatagaaactggaaaacatgttaattttgaattgtttccgcttttcatcagcagacatttgcagaaaaatcttgtgtaatttattcttttattttcaatgaattgttaaaaaatgtttgaaaaggcattatatcttctcctctgccattaatctacaaatggggaatattgggaggttaaatggcctctttaggatattgctttatgaaactgctgattctagcaatgccaggctagaaatacatactaatttaaggaaccatgaatgtaagcagcaagctctttgcttttgtaaagaaaagactaatagctttattttaacaaggctcctaacaccccagccggcagcaggcattgagtgaatgaaactgggagaactcccatggactaaaagcaccttaattcaacattccttccaaacaccaagccctcctgataggcttgtcacaggctgtcataatccagccaaagagggtcaccacgtgcaaggcgcaccaaggtatgagcgctttaaattgttttgaataagctctctgaagtttcacttcctgagctatatcagtaaaggaaagataaatatgccccaaatccaggcgtaagttctaacgttacactgttgtgtaaaaggctagatttctgttatggcttaagtcaagattgtttctgtcagacatatatttaggtcactacattaaaaagaaaaaaaaaacctgcatgataccaagtaagataaagggatttaaaaaaaattaattggattgaagctgctgaccttatttttttgtgatgaggaaaattacctaataaggagttcttcaagcaggaatatttctgagccttgttgagcacagagaaaaatgagaagtgagcttataaatgcctgtgtctcttttctctccctcactccctcttcaagtcatcttacttcctaaggacttaaccacaacttcttaaaattggcttccctttagcaaccctctatctgcaatttcctatcctctatttgcagctcttgtaagaatatttgtacccaacacactaatctatattgccaccatttctaaccgagtattaaaaattgatcaaattataggagattacatgaattatgatttctccatataatgggatattatatagccattaaaaatcatgttttaaaatatatccaatagcatacaaaattgtcaataataaacagatgagaaaacagctctatatgccattaaaatatgtatgtgtttataaatgttaacagaggtcattttggggtggttttccacaataatcatttaatggagaaaaaaatgattaaatctgtttttttggataatggaacagaaatgtatccccaccattttcattaactaacattgtatccctgagggagaggactttttctcatctctatgtcttatggtacttcacatgttactctacctaggagacactaatacatgtttacatatttgaaagtattaatcccattccataagcatgacagcataagacagtacaatcagtgtttatttattagaaaactagaaaggttttcagcaccagagagtctggctttctctccccatcaatccaccgaaatcactctcaataaaccaccaatcaccatctcattgccgattccaaacaatatttttgcagactttatagtggtctctgttcagttgtagagagcaacatccactgtagcttaagaaagaataaatttattataccatagtaatgagcttatagaaccataagggatgttaaagaaaaaacttcttggataagctttcaggaatgatttttccaagccacactccagaactgagctactgggggagctgttgctatttctatgtaggaagttttagactgcagagccacacaatgctcatatcaggagccaccatgattaggaagatgccacaatcagaaagccacctctcctgccaccaattctaagaccaactataaaagttacatttcactccccaaactagcaatgttacagctgctaaagctgccacaggaaaaccaagcatacctctcatttagtcagtcttgccataataaacagcggaagtatggccactgcctcaattctattttccaaatgttatggcctaacttaaatcatgccagtacattggctgcaagggaatccagagaaaggtagtttttagctttccaggctctggaattgaaggtgacactctacaagaagggtggattggatgaagtgcactaacacacagtccctgtcttactgaagcttttcactgttttggcactgtggaacactcccttcatggaattcttttcttggtttctacaataaaacattttcctggttttcttctgaaccaactactttttctcagacttcctcctgggttcagtgtttttggcctgccctttaaatgatggtgttcctaagaatagtattagtgttcctctctcttctcatttgtcttttcttttatttggtccctacagactcttcctgggcattcttttccaagctttctggtaccatctgtatgctgaacgtttcccaatactacatctctagtccagacttctctaagttgcaaaccattatactcaacgatcagacatctccattgacatgtctcaagtcagtttaacatgtctagatattccctcctcccacctctactccaaaatctgtccttcatttattcctgttttggtgagtattaccaaaaccatgtagttgctgagctcagaaacttgggcattattctaaatacctcactccctttaatccacagtcaatcctattgctcttacctctttgaaatcctaatgacactctcttgtcttcatcctttgaaaaaccctcaggtttatgctcttacaatctctggctcagacctttgctgaactctccaagttatggtaagaataatcttaaaaactataaattcccaggagataaaatacaagaaaatctagatgacctagggtttgatggtgatttttttgatataagaccaaaggcatgatctgtgaaagataaaattaatacgttgaactttattaaaattaaaaaatgttgctctgtggaagacactgccaagagaatgaggagagaagctacagattgggagaaaaacgtttgcaaaacacacatctgataatgaagtatccaaaatacagaaagaaatcttaaaactcaacaagaaaacaacctaaataaaaaaatgggccaaagacctcaatggatccctcaccaaagaagcaaagaagatatacatatggcaaataagactgtgaaaagatgttctacatcacatgtcatcaaggaaatggcaaaacagcaatgagatatgactacacacctattagaatggctacaattgggaacactgaccacaccaaatgctgacaaggaagtggaacacggggaactctcattcaccaggaactctcatttgttgaattctggtgggaattcaaaatggtatcactactttagaagacaatttggtggtttcttgcgaaactaaacatagtctcaccatatgatccagcaatcgccttccttagtatttacccaaaggagttgaaaactgacatccacacaaaaacctgcacataaatgtttacgtctttattcataattgccaaaatttggaggcaactaagatgtattttagtaggtgaatgactaaataaactgtgctacatctggaccctggaatattacttagccttggaaagaaatgagctatcaagccatgaaaaagcatggagcaaacttaaatgcatatgaccaagtaaaagaagccaatctgaaaagactgcgtactgtgtgataccaactatatgacactctggaattgactatgaaaagagtaaaaagatcattggttaccaggacctgggggaaggagtgatgaataggcagagcacttaagatgtttagggccatgaaaattctctgtatggtacagaaatgatgaatacatgccattatacatttgtccaaacccatagaatgagtaacacctagagagagccctaatgtaaactatgggctatgagtgattataatgtgtcaatgtaagttaatgagttgtaacagttgtagcacactggtgggcatgcgggtaatgaaggaggttatgcatgtgtaggggtgggactatatggaaatctgtatgccgcctaaatttttttgtgaacctaaaactgctctaaaaactagtttctttttaaaaattgcagtggtggtggtaacagcaatagccacagtaggagcaacagtagtatagttgctagttagtagtattcttttcttcataccttgtttctacctttgcaaaatcttcaaattccctgaagacacagtgctttcgatatgcctccatggtttttcacttttgtgctctttacttgaatggcttatcctactactcctacacccttctgccccagaaaaactcctcctcatccatattcaggtttgagatgacgcttcaacacccgtatgacgctgtcttcaactctcccaggtggactttggaatttcttcctgcggactcccactgcctccttcctcagacttccacagtgatctcattgtaccacaattgtttgcaggcctgtttccatgaggagacccgctggatttcttcattgctttgaatacagtgaatgactgcattaatgatgttgcagtatcaatggagaaacatacaaagatatacacaattagtgaaggacagaataatttcttatgtgcaagcttgctgcctatcttttgaagactggcccaagttctggtacttccatgaagtttttcctgacacctccaggcctcacctgtgctactgctgataacatcctgaatggcacttgaaaatacattatcctatttcattctttggttatttcagtttgaatgctgttttcccaacaagacagaaaatcccttaagaataaggatcaccttacatttcatacaatcttatatgctgttgggtatatttcataggtgtgtgtatgtatactatatataaatacatatatgtatatacatgcaaatatacaaatatatgcatatttatatgtatatatgtatattttatgtatatttgaatattttatatgtatatttgtatgtatatatgtatatttgtatgtatatatacataatcatgttataaatacatataattatgtgtgtgtgtgtgtgtgtatatatatatgtgtatatatatatatatatatatacacacacacacacacacacacacacataatctgttcctcgaggcaccagaacagtaacaggcatgtggtctcctcaaggcaacagaatactgactgctattatcattatgccaggacagttctggataacggtgctgaaactattaacttggaattttatagctacaagaaaaagttcagttggaatatccagagctatactatggatacataagcatagtgattttccaacaatcacaattaataaccttcagcatagtattgatatttgcaggaattctctttccataagaaatagtttaaaaacacaagaaagcaaaccttaggtaggaatgggtgaggacaatgtttctgtccttcacttcttccttttcttttttttttttttatcccctgtctgtcaccatccttgcctctggttttggtagaaagttcagaaatttaaaccaaggcttttatcctactgcagagaattctcaatctctctgtctgtgattgctttaaagatgtgaagtcttcgtccctacctacgtagtagctcactggactcttgccctctcagataaccccagtgtctcctgttccacctattgatgaaatataaagaggttttataggacacactctaaaggtcctcccacaataattaaacaccaagaatagtctttcttaatctaagtgcaagtgtatacttgttttgcaacatctctccccatatccccaaccccatatacacagtctgcacaagctgggatggaatggtagttttatggagagccgggacttttggtaagaagaaaataacttccaggtggttgattaccgcctagaaaaattttccctactgaccttgacactgttagttccttcctgtgcttactggcaaaatctcttccttcccacctgatagtccaagttttctatttactccttccatgcccatgtgtgagggatatccaagagcaaaaggaagcacatgagtggtccatgtgataccaagtgcgttgaggtgaacaggtggggaatcaatcagtaatcaagtacttttaaatacgtgttacgtgttcatcctgtttttagttggcatgatagctacagaacaatgagatacaatatcttgtcattaagaaaccaacacacagtattgaaaacctactggggccagtcactgccctttaggatttcagaggctgatggaaaagactccaagagaggtaaacacaggacgtacagaggaagggacaaaaacagtaaagaccaacactagatagaaaacagttcatcacttatgggtggccattcgtaagagagagaactgaggttcagggtggtcggggggcatcatggatgctgtggagtagacagttgattgtcagcaacccttgttagtaaagaaaggttttatagaaaaggtgcttttatttatttgtttatttatttatttattttgagacaaagtctcactatgtcagccaaactggagtgcagtggcgtgatgtgggctcactgcaacctctgcctcccgggttcaagtgattctcctgcctcagcctcctgagtaactgggactacaggcgtgcaccaccacacccggctaatttttgtatcttcagcagagatggggtttcactatgttggccagtctggtctcagactccagacctcaggcaatccacccgcctcttgacctccgaacaaagtgctgggattgcaggcatgagccaccgaacccagccagaaacggtgcttttaaaaatatggtcttttcacagccaagaagagctataatggcgtgaaaactaaatgtaacatactggatgggatccagggacagaaaaatagcattagttaaaaatctaaataaactatagactttagttaacaataatgtatcaatatggattaattgtaagaaatgtgccatactaacgttagctagcgataagagggaaactgggtacaggatgtatgggaagtctctatactacctgttcaatgtttctgtaaacctaaaactattctaaaaactaaagtcggttttaaaaaaagaagaagaagaagaagaagaaaatagtctagcatcctacagaatattcctggcatggggacatgagggagtcagtttgacagtgacccttttttgaaagaagtgactttgttgttaaatgccatgtttgtggcttgatcatcaattcctatagcaatgtggagttcttgcttgcttttccatggttgatttttggcaggcagtaacagcatttgtgcactgattataatttcgagatgcattgtcagtaaccaaggtgtataatggatcttcatctctaattgcttttctctccacaggtgcctggaaggggtccagatgggaatgcacacaacctccgctttgaagggatggagaggcagtacgcatccttacccaggtagatcacggagaggtctcccatctccagctcacctacaaatgaagtctttagagaagtctacatgaaatagaaattctggctttgaaatagggaatatgttataattttgccttgctgccgtctgctgtagccctagttccatcttcacaaatgtgctaataattgaaacacttgtgggttatttttaaggggagaaaatagtatatcattgcaattgaacgtgtcagcaagaacattggatactaaatggaaatcctaagccattgctataaaactggtatcgaacatcccgcaccaagcttagagacaatcaaatagtaaatcctctgtcctaggagttacgcacgaggaatggcgggccagtcttaagcttggagtttcatgtgggtgttaagaagcaggaaagaaatgtgaacttaggaaggtgttctttgcctgatttagaatctgaccttgttctcaaggcaataagcaaatattgctgagaggcacagacccaacgggggaaagaaacaactgcatgggaaaagtttgctgggccaccctggcctgacatgatccactcatactgtaactcaacacccttgaaaatgagatacaattctcaaaacttgtgctgttattggtgagatgaagaggaattttagtttgctatcagtagcacatgacaaagaaacagcttttccaagagtacatgcagtccagctacgattggagttaggtgaggtgagagtatgagaattaatgcatccaaaagagaaacaaagtaaggttaatgccacgcagaaagttgcagtgttttcaaatattgccttttaaaggggtgggggaaagaccccaagcagagtttttttatcaaaactgagctgttaaagtgccaactcagagatggagtgactgtttgacattgtatgttgactgtacctctgtgtgattttacaaaacaaacaccctgaacattacaatgggcaaagccaaagtgaccatctgcttttataaatagtatgttattttcaaaagtaataaaatctgaaatctagcagagaagctgttttgtcctgattaggcaggacacccaaaatacaatattttaaaacttttataaagttatattttatttatcttcctgttttcttttctttaatagatgttgtctaataagtttttcttatttgtgattagcttcctgtttctattttccttggcttagtacaactggccctcagtatctatgggtttcacatccatggattcgatcaatctcagatcgaaaatatccaagaaaacaaagacagtcacaatggtactgattatgtacaaactttttttccatgtcattattccctaaacagcacagtataacaactatttgcatagtctttacattgtactcagtattataagtaatctagggatgatataacgtgtatgggaagatgtgcataggttatatactaatacgattccattttatatcaaggacttgagcatctgtggattctggtatctgaggtcgggggctggggtgcgggaggtgcagtcctggaaccattcccccaaggaatggggaatcatccccaagggacagttacattttgtttcattttaaaaatggaggcagtttccaaaaatttgttttacatataagatttccggctttcactgttgaagtatatggaaattgtggttaaggcagatggaaaatagaatgttcttatgagagggagtaaaaaaaggaaaactggaaacagtttaaaatcttcctgaccaatctgcactcagagtgcagaaatggagtgtttgggtacaattcagaggcacagaaatagcatttaaaattctataaatttcactcattcattcattcattcaccttgtatctggtgatcacctagtatgtaccaggccctgagaatatggaaactggaggcacagtcccagtccatcctcaggactctactgttagcaaaggagtcaagcaaatcagccttttacagtagtacaaccaatgcttctgtttgtaattattaaagtcttctgaatttccaactcttgtttattttcgctaatccccgaaatactcactcatggctgactctaaacaagtatattttaggattaaacactgtggtgggggttttctgtcaaagataatacatttatgctgtttatggctctttatgaatgtatgaattgacaaaatcccgccagccccagaataaaactgtagctgaaagggaagcatctcaaactggaaataattctggcaaaaagttcactcacccacgtacacaatggtaagagcaattagttgcatgtgcaaacagacctttgcagctacctggcaaccagaggcagccatggtggagaataaatagggctcagataaatgcaagggggacccctggcagtggcttttaaatggggatgctgcatcccaacatctaaagaggagatgcaaagctccctcccaggcattgcaccctggtccatgggtggggggctccaaattaaactaatgagatgcagaaagcagaggccagagacgtactgctggcttctgaaaaggtatgcagatgctgctctgagtgccagtgacatttaccctggttttcttgtctttccccctggagattttgctgtccacttaattgaatcacgccagctccaccgctgtctccttttgccaggagagtgaggcgagcacatctcggtaggcaccggatccctcttcatcacagaggccgggagctttgaaatatttatggagttaaatttttaattaaaaacaggaataaatccatctgtaggaagtcggtggccaaccttatggagaacttaatatgctactgactgattgggttcctatgttgtttgtgcaatgcttcacagtagtttttaggaacaattcaataacattgatttctatgccaaatttggagccatcgacacagagagaaaatgctccacagcacatggagtaggtgaggagctctggtcaagtgctttcatggaactcggtcatctttaaagcaggcccatgcagcccactgccaggctaaatgacatttcacgaaataaagccagagcgctggccagcacaggaaaaagacaattcccagcacttggtagttatgaggttgcctaaggctaagggctaagccatgttaagtgttattgttaagcaatgttaaatctcctgcctcctaagaaaaatgactttacttcttttctcctgagggtgctgttttggaaagcggagtgtggttgtaatacaacctcgttagtaaacaccagacctgtaccagggccaatgttttaccagcctcaacagcccccagttttcttggtagtaaacagaatgaaatcagcattcctttattcttgcctgacaccctaggtgagtagggaagtggctgtttcctaggctgctatgatgtgcgaacatcaacgtatgtgtttttgcaaacggctcctttttcactccagcctgccagccgctcgcaattctcccaggtcccattctgatttcgcaggcctccttgtggtcagtcccttcagcactgaactctccactcttcccatctcaagcctccatcattcccacctggcccatccctggccccatgggatcccattatccccctctctgcagatggctctgtgcatcggcgcatgatattgctcttccggacttagaatcaagtgtggagtcctagggagtgagcaaaaggcactgcagctcttctgtggtcctacatgcgtgggcggcaaaaggttgctggagagactcgtaaaactgcattcatgggttccactacaagattcacattatgcagcaccagctgggtcccttgctgccgtccagctttttttgtagtcatgttgtcaactcccctgactatcccacagtggccattccaaccctttctactcccgttaagttctacgaagatgactaaactccccaagcccagtctctggaggtgatctcacttcctttgctttatgaccttgaggcattcaacgttagcccctcaacttctgctcctgcagctcagagtcctgcatcttagctcacacacgcttcccaaggggatgcactgagggcctgagctcggagtcaggccatgattatagccccagtttcatcacttaccacctgtgtggccttgggcagtgatggaattgcttcaggctctgttttctaatctgcaaattggggatgatattagagcctcggtaatagtgccggtatgagtattaaatacaataatacaagcaaaaccctcagcgaagagcctgtgtagtgcattgaaggattttttattgttagctctttttttattttatctcaggggaagaaatgtgccttcctgtaatgaggcaaacccacacaccagagctcattttccctggcttcttggggaccttgagccaccaactaccctctctcggcagcatctttaatccttttggcgttgctttcctccccctgcctactatcatagatgcacaacttcaggggcacagtttgccaggatcccccactgtgtggagaagaggaagcagcacctgcatggggatatgctgggggaactcactgaagctgaaggattcgccgactcaggaaagaccagtggtctggatggtcaagtgcaagagaacatagcaatctactgtgatctgagtgataagctgagctaatggacatgatagtagacagcagtgctatggagagggggtttataacagatacagcatgctgacttggctctaggcaagaggccagggctcctgtccagcaagacttgggtgcaggagtaggcattgctccagtggtagaggccatacccagggcgagttaaccaggaaggtggagcatgatgctctagctcccagggcagacatggcatgacagcagcaccctattcgcaggtgggagagatccagagatactgctaagatactcctattatctcaggaccgggcagtgctgaacatgcaactaccagacttatacctgagcaggactcgtgtggcaggtctaccccattaaattgactcttgtatgtcagagaaaaacaaagacccttggctcaaccctccttttcccacatttcctaagaaaaagtgggctatacctgttggttctatttccactcaacccactcacactatagcctcttgccccaggcttctgcccacaccactgatacttccaccagactctgcttcccgccttttgctccacatggattctctctgtgccgtctcctccattcctgccaattcaatgcccgtctctatgatgattccaaaagtacctgcctaacattcatgtcccactcttgtgaccccgtttgatatactcctccttctgcctccaagacgcctccaagtccccctgccaaaacccatgccatcttcctttgctcttcttcttttaaacttccatagcatttacttagcaccttcccagtgccctaaaaacaccctgaattggattattctccactgcccctttccaccccattgaaatataaattccttgaaataagagactttgttttatacccatcatttgttacacccagaacctaacataaggccatgtatacagtagagtcttaatacattgctatacagatgagaatagtttttttggtttttgttttgtttcctctacccaggtggaggcctaagtatgggctccaccactggagcaatacctactcctgcacccaagtgttgctggatggtctgatctcatctgttgcccacgttggagtacagtggtacaatctcagctcactgcaacgtctgcctcccaggctcaagcattttccatcctcagcctccagagtagctgggactacaggcacgcaccacgatgcccagctaaattttgcatttttttgtaaagacaaggttttgccaagttgcccaggctggtctcgaactcctgagcttaaacaatcagcttgcctcagcctcccaaagtgccgggattataggcatgagccactatacctagccaagaatagattttctttatatacaaggaagttatgggaaagaaatcccccaaagcttttttgacagttggttttagattgctgttttgcaatataagaaatgatttttcatgaggatgtatcttttctctgaaatcaatagaagtccagacttttttttttttttttttttgagacagagtctcactctgttgcccaggctggagtgcagtggtgtgatctcggctcaccgcaacttccgcctcccaagttcaagcgattctcctgcctcagcctcccaagtagctaggattacaggcacgcaccaccatgcccggctaatttttgtatttttagtagagacgaggtttcaccatgttggccagggtggtcttgaacttctgacctcaagtgatccacccgtcttggcctcccaaagtgctaggattacaggcgtgagccaccgcacccagcccagatttctaaatagttcatccctagtgagcacttactatgtacaagacacagttctaaatgctttgcatctcctgactgacaatgctcacagcaaccctgtgactcagcagcaacctgataattatccccatttcatagggaaggtcacacgcagagagaggttaaataaacttgcccaagtccaacagctaaaatgtggcagagctgggtttttaacccaaacagtctggctgcgagtttgttcattttaaccaccttgactaaggttatgaagctcagagtttaatccatactctgcacctatcatattctgttatttgctcacctgtttgtatttcttactaaaatataagtgcctttaaggacagggactgtgtcttcttcatctttgtatatgacacagaacattcctaatatacaggttaagtaatgcctttcaaccgtctctgtaatgctgtcataaaaatcaattcttttttccgttcccttgggccctttgtttgaaatatgaacagtttagtgtgtaattgctagatgaacattaagcaatatactttgcctaccaaaaagagaatcctgttagaacactcctgagagttgaaaaaacagtgtctgcaaattggtactgtagttccttaagattagaaataatatctccctggaagaaaaaaggtgacagtaaatttcctggtggagtgctgcatgagcagtcctgtggagagaaagactccctttcctgaggctgatgagggacaaaggcctgcttgggccacgttcgcctccagtccttgatgtttctgtaatccatgttacataagttacttgggagaaaaaaaggtctctctgaatatctcaagcagctttcaacttggctgcgcaatgggaagcaatatactggagctgagtgtggatagaaagagcaactttagaaggagcaagcagctaatgcttgcttcctaggaacccataatgaatttgctttctaagtacattcccggtgtttccgcattgggtacgattgtgttcgtttcagaagaaatacgccataagagcatgcttccactttaatgtttcagttggttcattttattggtctcagtcttctcgtctacttatgcccatcaggaagagtccaatcacaagtgcgcaggtaactttgaaacttgcaacaagcatgctgtctactatctttggttatcccaaaagtattttgtctgggtgtcctcaacatccttttctgtcatttacctcacttcttaaagatgctctccctctcagatttctcttgttctcttctacaatgaacttctgcttcattcactgttactgaattttcctttgccggcattgcactattttattgtgctcactaagtcactggcggtgacattcaagttctgcagatttccagcaatgccacagtactgggcgttggctgaagctaatctagatagtaatccaaagagttcaatgaaaagttgagaatcagaacattaggtaaacaggtgtgtgagtgcttgtctgggtgtgggtagaggtttgactgtctgggtctgtaaaagctgacaaagtctccatgctgcccaacttctctgtacaacaagtacttctctgtgcgacaaggccagcttgtcaaataagatgcttcatgagcatatatgtactgctccccgcagtcatgccggcggttggaatgttctaccagagtttgagggtgtcacacttcatttattaatagacactgtgaatcatggccagtggctttgacacttccctggtggtgcaaccctatccgaagaaccttcctcactgtgaaaagctaccttgcagtgtttgtccctaagattgctgctctgactttgcaggaatactaagatgagctgaagaacttgtctaggtcatatcttccacatctgcatatgacggggtttactgccttttgaaaatcagtgaagctcttttaccccaccaaattaagctttttcatcctttctcttaaggttccctgtgctgaaaatctagtctctacttccccttcccagtaggatcagctgtctgtttgaatggccccctgataccacctcagtcttaaggccaaggacaaaatgatgaattagcagcgatttaattctttgtgagattaagatgtctccattgtcaactcaaacttcctgaaaatgcagaaagccccagcatgtaatatcactttaagatgccaaacagctgagatcagggggttaatgctactgccacctcatttttatgtcacttagttcctcagataaaagtccattttaatcaaacttttcatcatttcctcgtagccaatatatccttgatgccagttagaatatttgatattaattattcagtcaaaggcctccattatgagtttagttagaatattagtgatttaaaacatgttaagactcatacagtagtgatgtccccaaagtagttttaactgaatcttgatgaaccacatacattaaattctataggttttttactttttccctcattttccatagaaaattccaaactgctacacatttgttggctaagtactcttttgagaggaagagtatgtgcctgctctttcgagagtgccaaatctgacattaccttggacatgaaatctattaagcttggtaagctgacttgcatgttttccctcctgcacatattaaagggaattttagcatttatttcctacttctccagccaaaagaaaagaaggttgttttgtgcctaggcatctgcttagagtattgctctatatctcatttctcataatctttggtagttcttgatgttttcctatcttattgccattccaccatctgcctcctaatgctcattgccctggaattatggtggtgattttcttgataatgctgtaccgttttgcatgatgcacactgtctttctgcacctacctcctcctgtcttctctgactccagccatttgcactgtcccttgattcaagttcctgggtttgctgtgtataggtatcttagtatcaacctactatagacagagacattatgaataaatgaagtgtattaatttattataacatctgatttgtatgtttgtgaggcctgtgctttatgattatttaaaatgacattatatcactgaaatacataaccatcttggataaaaagttagtgcctcaccaaatgcatgaatacatgatattattcaacaggagtaattaacagtaaaatcactagtcttattttccatttttatataccaagatctgcatgcaaattgtttcaaagatgtcatgtttattcctaaactagttgattgtatttaaatagaaaataaaactaagaacaatcaaggcaagggagaggttgtaaaacctattgcgtgccttctatgtctgtacgttttgcatgccttgtctcattttatcctcactgtccagctggctaggagtcatatgatgctcctttaataaaagaaaaaaatgtatccttgaagtcacagaatcagaatcagaattcaaacccaggactctctggtttccaaggcctttttaatttcacttgaccccacatgactaacattggcaagtcaaggagaggttggaatgcttacatcatctgttttcataagtaatgtgagttcatgagatgggagatatcttagaccatatgaagaatagcccatgttcattgtgaacatcttttaaggttccagagaaaatagaaaatgtcaaaacctacgggttgtaaaaaaaaaaagtaataaaatacaagaaaatagtagggaatttatgggaaataaagaaaaacacttttgaatcacacactttttcttcttttatcactgtaagttttcccaaagtagaaacaagatacctgccttttccttacaattaccctgttcctgttgggaacatacacagagatgtgagtggcgccccctagggctgcacagaccatgtgcatggaccaggtccccagcccctagattgcactctgcaccactcctccacagaacactcagaacaaggcaaggggaaggagttaacatttgttgagcccgtattgtgctccaagaactctggcaagtactttaaatatgtcacctcatttatttcctgtaacaatcctgatataaatattatcatccctattttatggatgaagaaactgagactgggagatgcaaacaggtgtggctaagattgcacacagaactagtgacaggttttggagtcagttcagtattttctgcatctgaaatttctgggctttctgcagcatcaaggtgtctggtactaggctggttgtaaacaggtaggagagacacattacgtgaccatcctttcctgaggcagccctcactgctctgatcccaccctaaatcactgcagtgtatattaaaatgagcatttcaatggataaaccccttataggctttcagaatgactaagaacagcaaccactgaatcacagaactcctcttagcaaattcaaacacccacttccttccagccaaaatattttaaatggtgcttttttgcttaaagactgcctctgtgttatgctagtgagttaaatatatatacatataaaccagttggttccacttcagcaatttttgtagccaggaaactattgttggttctttcacagtgtagttctggcacatccttaggggacatggctgagacgcaaatgccagacaactgcggaagcatcgcttctactgactctgctgcttcaagtccagagaagagagctttggcagtcagttactatggtggtgccacccgagcccatctgtgccctggatctcatgtgacacaggccccacgacctcgatcattctgccaagaaacaccttggtccagctccattatttccagcaaaggcaaacatttgtggtacaaatgtgagaggggttggtacaaaaacagcagcctccagaacgtgttcctgcttctattccaagtctctcattaagcctagacagaagtgaccagggcttgtctcaccagagggttgccccactctgcaatcagaactgacccttatggccgaacatggaatgacatgttaaataggtaggaacctggcaattctcacgcgccattctccaccaacagtacactctgggacatcattagtaccctttcaacttggtcattgcttgaaagtgaagacagagtggtgactgcccagataagacttctgcccactaactgcttacatgtggctgaggcaaacacagacccttttccagaaatgatagtgtctgacagcccgggttttacaaggcactggaaagatctataattgttacagcagaggtttaagatggaaaataagcatgttgagctatttggagaaggaatttgccacagtgaagtttttttcctggaaacagtcatataaaatcaggatggagttggtatcaagcttcttggtcactttccattgatatgtcggtgcctttgacaatttatgttaaatgtgcaacaaacacccttttacagctttgtccaacatcaaaatcaggtccatatataagacagtttctagccagtgttttataggagtgatttctggatgtggtatctgtaatgtggccaagataatgtgaagactctgccttctgtgggtcggttatagacaagtcacttatgttaccatcttgtcaacaacttgaattcctcagtttgtcctttttctggttacttctttcttatccaattttttaaaaaatgaaacagttcagtcagagcaatgtgtgcaacttattagcctgaacagatgagctaggaaagtcatctactctccatattcctgcatttaacaactatttattcatgacctactaagtgcaatacactctgtaggccctgaggatagcgtgataagccccatagacacagtttctgtcctgtgaagtttatactctagtggagaagatagtaattcagcagtcacaaagaaaacataaaattgtaactctgcccattacaaaaaaaaaaaaaaaaaggagagatatgtgatccaagaaaatagaatgtgaaattgcaccaaatcaagaagggagggagacatgagttatgatctgaaggaggtttaagacaataaataaggaatattccagaaagagaacagcacacgcagaggccttgtgtaggagaacacgtaatgaacagactgaaagaaaggtgtgtgactggaacaaagactgtgggagttgagcaggaaagggaggtagcagtcagaccatgagtggtcaagtgaaggacatctgaacttactcaaagactagaaacctttgcggggttttaagcagaaagatgatatggttggatttgtgatccagaatgtttgtctagctgcaaggtagagaattgttaggagagatgctggagtgaagcagaccagttagaggattttgctgtcattccagggacagatgttgatagtatgtaccagggtgatggtgatgaaagcagaatcggagagaagtgggaggagctgatgaaccttgatgatggattgcatgtgggggtttgaagggtaagtgaagccaggtgttaagaatggatccacacacagcagcatgggtgctggtcccacttcccaggagacaaggcaaagagaggactaggtttggcagggagagatcatggttaagctttgggacatgttagatttgaggtacctttcagacttccaaaaggagaccactgaaatgtgccctagagatgtctcgacatggatgggaattgcaatggctgatccaggatattaagcaaatgtgtattcatgaaaactgagcaaaagaccccagggcatatcaggggtgatgatgtaataaaccacagagtcgcatactcagaaagtacaaataaaggcaggtcgacagtgcagactgcaaaaacctgggcatccttctgtggctgtgacatgccttcactgcttagatcgacagcaaaggcttatctatcactgtctttgtaatttcattctggaaataatatttttctcaagtaggaagaattggtgacttaatgtcatctggcattctgtgactaagcgtagctctgactccatgaagcataaggatgagggtaagaagaaacggtggaaactgttttgatatctgtactgagcttataaaacagaataaatttgttcagaaatatgcactaaaatattaaagggtaaagaggaacaagtatccaatttactctcaaatggctcaggaagtatcagtgtgtatatttaataatatgtatgtatgtatagagagagaaagagggaggatagagaggaagggaacagaatggaaaaaaataatgaatgggacaaaatgtaaagaattgatgaatttggataaagaatatagaacattccttgttttttttttttttttttttttttttttgagatggagtcttgctctgtcgcccaggatggagtgcagtggcacgatctcggctcactgcaagctccgcctcccaggttcacaccattctcctgcctcagcctcccaagtagctgggactacaggtgcctgccaccatgcccggttaattttttttttttttgtatttttagtggagacagggtttcaccatgttagccaggatggtctcgatctcctgacctcatgatccacccgcctcggcctcccaaagtgctgggattacaggcatgagccaccgcgcccggcctgtactagtgttgtactagcaataacagtaacaaggaatagtggacattctcataattttccagtatcaattcaaaagtttaaaaagtcctcattttggtgtcctaggcagggcttctccccacccccgagaagaagactctgagacagggatttgagagcaagtgattttatttgagaagcgatcccaggaagcattggaagcggagtgaggaaggaaaaggaagaaagccagtacagagcacattaatgaacagattaccactgcaggcaagagggaaggagggctggggtcttctggagatggtagggaagacactcacaccttgccccacctgggggcaagcatgttgaggtacttaacttttggtcccatttgtcattggttaagagttgttcctaagatatcaactccccagcacttcttcctgtccagtgcactggtaacagaagcctcaagccaggcagcacagatgcttggataaggaccgtagtggacagaagtgctgcagtgatgggggtgtgggggcagtctgctgccacaactaaggaagtgtgaaggctcagggttcaaagcagatcagttgtggttgcctttcgtgagagaaaacatatgagattagtaagatgccccagacaatcctgatgccttcactttattattggagtaggtgctctgtgaattggtcatgtcttgtacggaacacagtgaatgccaatagcaccaacagagcaacccaagagaataactctagaagaagatacttccagtttctctttgtttcactcaaatatgcaatacatcaaaatgatgtaaggtctttgacaagttcattttctgtcaagcccatgctcagaacatcactgaaatacagcagcacctctgggacactcctgggattaggaaagcctctggaaaaattaaacttggtactgagttgcctgactcaaaaatgcccattaatgaacaatgatggtttgagtgtgtgctgtggctttacctaggatcgtggctatacacacaggcgaggtaaagttctacatggatttcaacatgtcatctttgcttcaattatgaacaataaaaacttggccaaactcagggattcgtcagatggccctggtcgtgtgtcttccatggtctccacagtctcaccttagcctcaggccttcatgctaagacactagcgctgtatctatgaagcctgtaaaactggatcagtcacatccagttcaattaagatgcttaggctcaccttcttagaacaaaaagtatgtgtcataagtcaaacaggctacaggataaattcctagcatgtaattaccaggtcaaagaatgtgaatatttttaaagtttctgatgtatattgccagattgacctccaaaaaggttgtaccaatttacacccccaccagcactgactataaatcatttttgaaaacctatgtcaatttaataggttaaaaagtaacgattatgatcacaaactgttttaatttgtaattcgtttactctcagcgaggtttaatttttctcatgtttattagaatcctttttttttttagtttgttgtagcttatctgtttgcatgtcatttctgtctaggtgtttatctctgtcttcttgatttcctagagcccttcatatattaagggcattaacactttgacatatttaaaattattttagtttaacttaagctatctttatggtaatataaatctataatttttatatgttaaatctttcatcttttgccttataattttttgcttttatatgcaaaaggttatctctcattatgaaatatccatactttcttctaattatttgattattttggcacttctacagcaggaatgctttgaacatccatgtcattttaagtagtaatgtgattttgtaatatagtttcaagcaatatcaactgactgtgatattgttataactaaaaaacacatggtggtctagacacccatgctgaatggctttagacaaatattgtggaagatgtctgtgtagttcattggcacatgtcaaccagaatcaatttacatcttgctctcactgatattatgccctatgtcaggatactaagtgtcctgaagcattctgacctgtgttcttggaatgtgatacaacaccaggtattcagtgttctgggaatagtcaagatcatccaattgggcttttttctcaaaatggtacttcttcttgcaaaatatatgctcttctccttgatgctctgccagctgctggaagcctctgccgtgttagcaaggcatgcctgttgaactgacacacacacccctcatctcctagagcatgccttcctgtgttcctcagatctaggtgatcagaactctaagcatgctcctcagagaaaccatgtataacattgggagttgccttttaatttctatgataaaaagatgcagttttgctggaaggagacttgtcctgagattgtgtgtcaatttggctaagccgaaaggaactatgagaggagcggttcttaatctgggatctgtgcatatctaaattgacagtgattagtttcaagggaccctcaaattctctgaagttacatgccagtttatgaataatattttgtacatattcctgggggaaagggtgagtgagaattttgtaacccaataaaatgaaaactgactgaattaagggattcactgtaaacccttcttaaaggggtcattttttaaatcctcacattatagttcctatgtgactggtattttcttcacagaatagcaatgccttcacagagattatttcattcgtaaaaacttatgagaagaaaatacccatacagtagtttattgtgtgaagggtatcttcaatatcagagtgaatttaatagttttcgcaagaaaccttattatggtctaactttcagctccacacagcacagtgtgtatatatatttccattctggatgctgccttttggtctgcttttaaagagaacaaaaccttcccagcatagaaatcccacaaagcaggttgaatggcatcaaactcatcctcctcgctcccacccattgcaccacaatgtgaaatacagaacctggttaagctttagagaccagacgtatgtgttcacccgtgctacctaaagaaggatttacacattctgctatcttcccagctttggaaaaataacatcctgttctcatccgcagaaagtagagagggagaggaggcactcgtgagaataagcagacaacaaccttcatcacagccaaaagtactatgctgatcccaccataaattatagcagcataaaaccacaggaaatccaaaggaagtaaaatattaatattaaaccatagccactccaccatatataatttagataaataatccattttctatatgtaggatattggaatatagctgttcgtctgccactagcaacagttgatatttgaaaagcatagagactttagctgctggtggagggcaaatgtgttttattcattcttattcttaacagccaaatgtcctcaaataaaatactgatcaatggctaaaaatttaaaggccgctatatctttgtctcataatatggatttgtggcctaatctagccctttcttgacctttttgcctaatggtgggatattaataagcgaaagatggttacataaaacatcctctgcatgtgaaattttttttacatatgagtaacttcaggtggctgaagatggaatgagctaacctgaaagtaacaagctgctcactgtcttggccaaattaggcttaatgctgaaaggcattcttacttaagaagtcaagaaggccgggggtcaagccgtcaggccacggagtgcagctgttggaccaccttttgcagtctccaagggagcaagcaaagaaaatccagcaaagaaaatatctcaaagaatcaacagggagagtaaaacaaaaataaccagatgtcccagaagactctgttggtattatgaagaaggctagagcaggactaacagggtttggcttttatcaaccttactaataaaagtcacttggctctccatcgagaagagcagttggtacaatatggaaaggttttaaagaccattaatttcttgaaatgaaacagctggccttattggctattaaataatgagccagattctccccagtgcctaagtcactctctggcagtaaattaggcatttagggaggcacattaactctttaagaagattagagttcgatttagtgcactttatgcataggaagaaagttacagggaatctggctgaagctgggcagagaaaagatggagacaaggtagactcagatgaaagaaactaaacacatgatttgtgttaactgggcagctcaggtgagcatgggaaattggagcagtcgagctgtggagttattttgtttattgttctgaagttctatgagcatgaaggtagagagttgagtcttcatttattgattcattcattcagtaaacttttacataaatactactatatagccagcactgaggaagtattcttccataaaacacagttcttatctctagggattttcagtctctggtaccttgggaagagagtagaagaatgacaaattatagattatttcagtcaagtagaataagtgctaaaattttatatgcataaatggaatttgaagaagtggcaagatgtgtagcactttatacaacacgctagggactttgactctacccagaaggcctcaggcccttgaaggtgtttaaagaaagaaatggtttaatcagatttgcactgtagagaaagccccttgataatttcatggaaaataaattggagagacaggccgggtgcggtggtgcacgcctgtaatcccagcactttgggaggccaaggcaggcggattgcctgagctcaggagtttgagaccaccccaaacaacatggtgaaacctcatctctactaaaatacaaaaaattagccgggcatagtggtgggcacctgtagtcccagttactcgggaggctgagggaggagaattgcttgaacccagaaggtggaggttgcagtgagctgagatcatgccattgcactccagcctggacaacagagggagaaccccatctcctaaataaataaattggagagacaagactacaatcaggaagggcattgtgaaactgtttatgtggtccctacaaaagatgctgaaagcctgaaatgaggacataagtgggtgtattagtccattttcatgctgctaataaaataatacccaagactgggtaatttataaaggaaagaggtttaattgactcacagttcagcatggctagggaggcctcaggaaacttacagtcatggtagaggggaagcaaacagatccttcttcacatggcagcagcaagaagtgaagagcgaagcaggagaaaagccccttataaaaccatcagatctcatgagaactcactcactatcacaagaacagcacggaggtaaccacccccatgattcgactacctcccaccggttccctaccatgacgtggggattatggaaactatagttcaagatgagatttgggtggggacatacaaccaagccatatcagtggggaagggcaggaagggaagagaggcctgtgaaggagctgagctgacctgtttgatgcctgattagatgtgggcatcaagagaaagactggtgccagagaaaactctggagccaggctggaacaactgggtggctggaggtgccattctcctcatagatgaggaaggatgggtgtaaggctgggtggaaaggcagagtggtgacaattctgggctccagagcatggttccaatggatggcacatagagaactcaaagtcatccatggcaaccacctcatgagatttgaaaagtatgtatgaaaaggaaactgagattttaagactacataattcctagaatttaaactgaatccttggaagagtattttgctttgtttgatttttgtgccaaaggaaaagatttcaaagatgcaggtgcctccaaactgaggttctatcattgatcaccatcaagagtattaaattgatgggaaacaaactggaaatagtcatctctttaaaaagccaacttttttttacaaggaatatctatagttaataaaacatcgatcattgatatgaatatcaggaaatttatactctttgtgagaagtagaaaactgcacaggttgcagactagacaagttaacagttctttctctgtcggcacttaaaatccataccgtggcttctctctatggtatggagtgaaacgtgccaacaaattgacttagatgatgtcagtatctgaaaatatggaagaaattatatattggaggaaaaagaagaaatccttatatattaaaaggtgttgacagcttcaccgcagaatagcaaaaatgtccttaaagataaaacacttatttcaaaattttagaaaccacaattacagttttatatactatgtgcagcaaaagtcatttttagaaagaacattgaaatcaaagtttactaaaccagtaaccttgtggcaacttcctggtgagaacctcattcttcaggaatgtgaaaagcataaaattaaaagagtcgaaagtttgtagattgcctaaacataatttaccacaggcagacaacgaacaagacaaaacatgtcacttaatattatttgcaagtcaagatgtcatcctggtgccagttgcatcatggtttcaggaagagatttccaggtagatggccatgaactatgccatctatgctacgccatctgtgtggctatgcccatgtaagcattgttatccacgggctgcagctggacgtgtttgttaacaggtttccaccatacaccatagtgacaatggctcctctagaataattccggaaagatctataccaacagcgcttgtttgtgtcatttctagcagtaaaacccccgttttctagcatttacaggaatcaataaagactcactgacttagcactccagtgggggggcaacttcacttcattgtaacatgctgcctgaacatttagcaggagacaaagcccttcccttcacagttaaagagttcaaaaatgagaattcctgggctaagatgcatgtgagaatatcttattcttttctgtgttgacaaggagatggggaaagaaggtaaggagacatggggacttatagaagctgcaatggggaagtcactgaggagtaaaaaaaaaaaaaaaaaagaaagaaagaaagaagtcataccaaagacagaatttacagactagaagcctacaagctgtggcttcatctgtcctccacagaaaggttcatcgtatcctttgtcagggacccatctcataagctcccttactggatgaggagagaaagccattgctctagcaaagcaaggcatgatccacatcaaaatacattatatacacatttaaatagacacacacacacacacacacacacacacacgcgtacactatatataaaaatatattttcatgtaaggtatatatatattatacacacacatatatatcatatatatacaatatagatagatacacatacacactgtttttagtgcagtttcaggttcacaccaaattttagaggaaggtacacagatttctcataaacctgccacctcaacacatgcgtaacttccctcattaccaacattcccaactgcagtggtaaaactgttacatctgatgaccctgcattgacacatcataatcacccaaagcccatagtttacattagcgctctctcggtgttgttcattctgtgggtttggacaagtgtataatgacatgtatgtatcattatagtatcatgcaaagtgtttttactgccctaaaaatcttaagtgctcttcctagtcataccccactccacaccattacccctagctactattgatctttttgctgtcttcatagttctaacttttagtatgtcatatgcttggaatcacacagtatgtagccttttcagattggcttctttcactttataatatgcatttaagtttcctccatgctttttcatggcttgatagctcatttctttctaaggctgaataatattccagtgtttggttgtggcacagttgattcattcacttactaaaggacatcttggttgcctccaggttttgaccattatgaataaagatgctgtaaacgtgtatgggcaggttttcttgtggacataagttttcagctcttttgggtaaataccaaggaacatgactgctggatcaagtggcgagacaatgtttagttttgcaggaaagcaccaaactatcttccaaagtggctgtaccattttgaattcccacaagcaatgagtgagagttcctgttgctccacatccttgtcagcatttggtgttgtcagtatttctaattgtggccatcctaataggtatgtagtagtatttcattgttgttttaatttgcatttccttgatgacgtatgatgcagagtatcttttcatatactgatttgccatgtgtatatcttctttgatgaggtgtctgttaaggtctttggcccattttgtaattgagtttgttttcttactgttgagttttcacattctatgtatattttgataacagtcctttaacagatgtgtcttttgcaaatattttctgccaattggtggcttttttttttttcatggattgtgactttgatgtatctaaaaagtcatcaccatgcccaaggtcatctaggttttctcctattttatcttctaggagttttatggtttcacattttaaatttagatctgtgagtcattttgagttaatttttgtgaagggcataaggtctgtgtctagattcattttttgcatgtggatgtccagttgttccagcatcctttgttgaaaagacgatctcttctccattgtattgcctttggtgctttgtcaaaggtcagttgactatgctaaaatgggtctacttccggacttcctattctgttccattgatctctttgtctattctttcaccaataccacagtgtcatgattagtgtagctttatagtaaatcttaaagttggctattatcggttctctaagtttattcttctccttcaatatttggtttactcttcttggtcttttccctctgcatataaactttagcatcagtttgtaaatatccaaaaaagactttctctgtttttgattgggattgcattgaatctgtagatcaagttgggaagaactgacatcttgagagtattgagtcttccatccataaacatggaatgtctctccatttatttaggtcttctttgatttctttcatcagaatttcgtaattttccttagatgttataaatattttgttagctttatacctaagtatttcatttttgaggggggcttatataaatggtattgtgtttctaattttaattgcacttgttcattaccagtgtatacgaaaatgattgacttttgtatattaattttgtcttctgcaaccttgctataattgcttattaattccaggagggttttttgtgtgtgtgtcagttctttcagattttctacctagatgatcatgtcacctgcaaatgaagacagtttttttttctttccaatctgtataccttctatttctttttcttgtcttagtgcattaactaggacttgagtatattttttagtatcctgtttgctgtttcaaaaaccaaccaaatgaaaacaatgtccatcagggccaagagaagcaagtgcttgaggaaaatattttccttcattttttaaccttaaaagtgtggtaggaaatgggaaaatactttaaataattcagaggatttgatgcactgcgggtgataggtgaattataaaagagaaagcaaatgtacatggattttatattcaaatcccatatgggccaaactacagaacaaaaaataaaaagcaaagactgaaagagtacatgggtaacatgtatttaactatttctcaaggatagcttaaaaatgaattacgcttggcaatgtttttttcttttcctgtgatgacaaagacagtaggaatatttttttaaagggatcttcacttaggttaacagtgtctccaagagtgttcaagtctccctgctctcatcagatggttcaatgcagttggtttttaaagctaccaaagtaacttcctgagtatttggcctgtcttgtggattgattcagaactacccattgctttccaaagaaagttgtttccgtattttatgaactcttctataacatttatttctggaacattgataagaatactgctgatggaaagcagtttaggctgcaggcatatacctaatttttctgctttgttggagtaaatatggagctcgcctcactggattggctctgtatcagtgtgtatccactctttagctacttgtagcctgtctctcaccagggatattcacaagggccctgctcattggcccctgagcaactactcttccactgataagctgcaacatctgccccaggaattgatttccccacagactccactcctctcactatcctctctttacattgacagtgttacgagtgcattagatcaggtaagcttctgtgtgtcaattccaaataacaatgtggtaactagagtttcattaatatcatgtcatccaaagcaagaggtttatatcccttgtcaataccatgaccatgcacatttaaagaacaagatcccccccaaaaaagaaagaccgttctcttgcacatgtttgtgacatttaagaagttacgacagacacatctataaccctacaatcaccttggcacctgtacagaaagctatagttaaattattggcgaagtacacaagcaaatgaaggtatatctactatgaaacataaataaaacatgtatccttacaagataaagtaatataagccagaatcataagaatgaatgataaaaatagaatcatgagaaaaaatggtatcaaggtattggtggtgtcaaaatggactggcccaaagccaacctttcaagctgaccatgatatatccagattttgctatcacataataattagtgatttaactgtatgaagtcaaaatctatgtcattattatatagattcttgcactgacacatcacgtcaaattatcttactttttctgttttttaaatgaattttaaactcatcttcccaatcagaaaaaaataagcttttcccaaccagaaagaataaggtaagggccgtctcttaaccttttctgcattctgcattctctgcagtacctagctagatagtaggtatttggtaaatatttgctttcaaaaaatgattataatgagctgttttaataaagtgtatccattgtaagaacacacgtaacataatgaacaaataattagcaaaacgtaaaaatgtaaatattcccataaaacagctttttgaagctgtaagaaaatatatttctcttcctagccttctaattgtttatttttgtgggccctgaagtctcttttcaaaaaagaaatgagaacggttgagcatctggattttgggaatcaaaatggtcgggggtggaggtgaggaatgtccgagttaaagaattaatagaaaaccctgagtggcccatttaaggaagaaaaaaggctattgtggcatcatcagcttttcctggctctctcatcctcatcctcatcctcagagatgaggtctcccctgtgacccagaggtacctttccagtatcagtttgagaattctaataaacaagctgaaggagcagagtccccaaaggggtgtctgtgccgacagggaaggcagctgcggttatgaaccagcacacaccagaggccggcaagctattgggactttgtgtgagtgggtgacagttttaatttcactccccagcagacgtggtatccagccagcagtacttcaaaccaattttgcaaatcacattttgtggctgaaaattggtttactgcactcgtcccattttggaggccaaccttgcctgatttaaggtggcgcctttgttgaggggggacagttaaaggattcccttttctctaattgaaacgacagcatattctttcacagattaatttcaactacctatgtttatatcctttaatcaggattataaaaacagcacagataattttctgcactattcttttttaatttttgagggagtaataatagccagttggctcttgacacgtattgccttatatagcagttttattccaagcaccctaccttggactgtgtatcattgtattcttaattatttttaaacttgattttttctcatatttaagtaacgggggaataaagtctaagtcatagatttcactgacattccttctgtgaacttaaagatgatacttgcataaagagatttgtcccttggattatatctcacactgaaataagggccttcttactggaagaaatatttcttaaaaatgagtacttgcaagaagtgttcatctgtgaacttttaccaattagaaatggctccatacttaagactctttaataatgtctcttaagcagcattttagctcatttttataacacattcaggtttggtgatttatattaaacattaaatgtaataaatttaggtcttttttcaagtatgacgcacagcatctctgaatcacccatttcagcagagggcccctggaaggtccaatctctcgctatcattcatgcttataataaaacgggcttctccggtctcttccttgacatcggtaataatgggaatgacatgtgagtggtgacactgttacaggagggcatgttgatattgcttcatggctgggactgagtgtccatgaccggagggtgggctgagaacacacatcaacaacttgctgtctcaaatctgcaccaaaagctatactaatgcctattttttaactatacaaaaattcaaggagtaagtttcagtgccttaaaaaaggtggctttgtatgtcttactctatatgactgcaggttttaaaagaattaatcacgaagaattgaacttggaaacatgaatggatctcttaatgatagtcatataagagagattttaaatcttcctctgtttcaaccattctaccaatggttgctgcattcttcacttggtgagtcatgagaaggcacgagacactaaaatgccttggaaaaaaagctgctctccttgatgaaacaataattagaatagccttctttagaactatcatgagaaatttcactataaattattctatttcatagtgacagtgacttacaatataaagtaagttttgactgcaatctgagtataaaataccaggatacttttgggaatatgtatctttaattcagaaaatgctcacatttcaagtatttgaataagattaagcattaactaatgctttcattaagatacctaagcatttatacccaaaagaaagggaattggtatatcaaagagatatctgccctcccacgtttattccagcactgttcacaatagccaagatttggaatctacctaagtgtctatcaacaaataaatggataaagagaatgtggggtggggagatatatatagatatatatagatatatatagatatagatagatagatatagatatatagatagatatagatagatagatagatcctgtcatttatatccctgtcatatacgtgtgtgtgtgtacgtgtgtgtacgtgtgtatgtatgtatatataaatatatataaatatatatataagtatatataaatatataaatatatataaatatatataaatatatatgacaggatcttattctttttatggctgaatattccacatggtgcacaaggatgcagaaacatagaataaataagatctagtatgtgacagcacaacagggtaactacagccaataatttagtatatatttttaaataactaaaacagtggaatcggaatgttcctaacacaaaggaatgataaatgcttgaggtggtggatacctcaattaccctgatacgatcattacacattgtatgtctgtatccaaacatcacatgtaccctataaatagatacatctactagtaaaaactaaaaatcaaaatttttaaaaagatacctaaatcatctaaaaactgtaattattttcttagaataaaaagatggtggaagtaggcataactccaattttcaggcacatgaaggttattgcctctgtggcaacgtttgtggatgggtttggagatggtccacagagcctggcagcagcttggttcccttggttcccagatggggagcctggtcctgctgtcttcatttctggttgacacttggaaatgactagatgaggagtcatgcattagccaacccaaatccatccctcatgcaatcagtcctcaatctcaaatgggcagtttctactggcctagaacttggggtacctttcctgtagaaatgatgcactatgcagtgagcaggttgcaaggcttgcacaaatctacttagctcatgtaagtgaagtaccgtccatgtgaaaatcatcttaaaaatatggttgctgtgggacatcggctaacacacctgccctggtgtgggcattctctacagttaatagactctggataattcctatcgtcttgcctttacgtactagagtctcataaaaaatgagaaataacgaacggaaacagaatgaagaaacattgcttttaagaataccattacaatgctggtaattaaagcagaaaaaaataaaattaagtaatcatgtttcatctattttaataattgtgcttgagaaaaagcaggttcaatcagagaaggatgaggaagtagctggaagctgtgtttgaggttctcaaggaggcatctggccactctccatgttgatgactttgattcctttgggaattttttttaaattctctagactagattattgccttttcctcaaatatttttggcagtgaaacacagaacaaatggaaccaagagcaacaaggaaggttattgttttttttttttttcctacgtgtctagggaagagtgagagaggcagggaaaggagattgggagctagtaaaggaagtggcattgcctccgataaaagtaactgaggagtttattagtgacacttatagggaagtggcctgctcaattcccttgccaactgatgcaggtgagggaaaaaaaagaagggatgaggaagagatatctgagcctacagttccctgtgacagctggggaaaagggcaccgaattcaggacagctcggtcattgaactggccattctcagagtagcagggaatgggtgcttatggcaggtggggggaagggtgtaaatatataacctaattgtatagaaatataagttaattgttacaaaagtgtatggaattggttgttcttgatttagggagattcaggttgttcttgatccaggacagaaaatgtgcaatatatgctctccgtggattcttttgtgaaatgaaaattagagcatagcaagtggttttgagtcttcatttaacaagtacgcaggcactgcctgtgttatcagcttgaaagtctgctaagaatggatgggagaaacagagcagttcacatttgctctttgaactcagagaactgatctgagtgcatggcaatgatgatggaaggaattaggaaacgctggaaatcatatgcaaagaaattagtcatctctctcctcctaagctctgtgtgtgtgtgtgtgtgtgtgtgcgcgcgcacgcgcgtgtgagagagagagagagagatgcacatactactctggattgccttgagaatagacatcatgatggtggtggtggtgatgaagaggatgaaagcagctgatagtcattgactgctcattgtgtgctaggcgctgttctaagcatgttatgtgtattcactcatttaatcctcaccacatccctattatgttggttccattatttatctatttcacagttgaagagtttcttaccaaattttaatccaatagtcccaaatgcaaccaaaatgaatcataccttttgtaaaatgatcttaaaaccatactcatttggacgaattggaacaaccattttgatacatagcaaaagatgctacggaggtctgccacaatctttaatctatttccttttcctgtcttacatccccctcttccacctcacctccagttctactggcctatcttctaactctgtctacacaacctgtgcctgtcacttccaaactgcccctcataaattgtaaaacagaaaggaaggggaggattttacacattctccttcattttgctgggaatttataaagagccatgttacccatgataactctaagacactacagggcattttcaaatattttatcttggaaacttgattttcgaagtatttaggaaaatgcttcaaagtcaaaaattacaagcagttaatcacaattggaaataattctttgtagatctgcactccaatatggtagccgcaacaacatggggctatcagacatttaaatgtgtctgaattatgatgtgctttaaatgtaaaatgcacaccaggtcccaagacttaatgccaaaagcaaaagaatattaaatataaattatttttatatggattacttgttgacattatcatactttggatatattgggttaagtaaaataaattattaaaattagttttacttttgaatgtggatacaagaaagttttaaattatgtatgcgaggccggacacgatagctcatgcttacaatcccagcactttaggaggccgaggcaggccgatcacctgacgtcaggagttcgagaccaggctggccaacatagcgaaaccccatccctactaaaaatacaaaaattagccgggtgtggtggcgggtgcctgtaatcccagctactcgggaggctgaggcaggagaatcgcttgaacccgggaggcagaggttgcagtgagccaagattgcaccactgcactgtagcctgggcaacagagcaaaactccatctcaaaaataaataaataaaaataaataaataaatgatatatgtggcttgcattattttctcctggggcagcaatgctgtagactgtcaaagaggctccatctataaatggtgatggtagcttctgttgaaccaccctgctgaaagtttgaagagctcatgttcagcctgagccttcttttttggaaaacacttttttccccttagattgtacataataccaggcacacctggatttctggataattgcacccacaagtggctacatgcagacacaattaggtgcttgcaacttgttgaaggcacaggtgtctaattgcgcccacaaatgaccgtttgacaggcaccactcattgtgcacacccgctgattatgggcagaaaatggcaccaaccaaaatggaggcctggatagtggaggcgtgaaaatagatccttcgtaaccccacagccttggaatgattgctcactcctttctggcttagtcttttttgtggaatgcctgcctaggtgtttatggcaagaggcatatttggaatgcacaggctgggagatgaaaatgtgtatgccctatcccacaaagtaaatgctgtcttgggcttttaagtgaattggggctaacaaaatccacactgtcaacctgagtagccttagagtggattccaccctgctggggctggctgtttataatggctaaaaatgatggagtgtgagagaatccccagggaccctttggtaaatagtagtttttaaagggttaatccaacctaatgaatcatttaatggggatgagaaggccaggatggtagcctccggaagaatcggcaggcatttatttaaatgggatcagttagggagggagcaggccagctgtgtggcagggactgttggtgcaggtcacttctccaggcagggagtaattgatatccccagctctcctaacagctgaaacaacaaagcgggacatggaaacatgttcacttacacagatttcaatgtccaaaggaaatgtgggggacacttaggccctgcctcttcaggttttagggctttgaaggtggggaatcaggagtcagctgtttctcccccaccacatttcaggaagggctttgaactggatttcggtagctttgtgggctcttgcagaaagaaagccttgtcagcactgtggatgataagtatccaccctccggccacagcaggtctggtggtcacgggaacccacatcttacattcaacagagcagcctacgtccacaataaaccaacagtccaggcattggtttctgagctttcagaaggccaatgtgaggaaattcaaaacacaacagcttgacttggtttttccagggcagaaaaaagattttctcctaatgagggatggctttcatagtgtgtatttatttgcaatataagtaagttcatgatttacccatcttgacaaattctctgtcttggatcttcacatccctttgtgtccgctctttatttatgatgatagccgcctattcttgaatggcaatgctgttgtaataaatctccataaaaagccaattctcagttcaagttactgcaggctgaatatgaggaagacagtcagaaaacacatattgattgtcctcttttagagactccgtgacaggctcagctcagaacttctttcattttgactggactgcagctcaacctaatgtcaacttaccataattcttttatgtggaaggctattattccattatgattttctctcttgtcacctagtatccagaaagggttctgttgggaagagattactggagaatattcttcatctcagatatttcgttccttatggtctggcctgacctttccttgtttattttagaaaggcagtggaaaatgttctgtctcctgtttttagccatctttatacatagccttaagatatacaaaattatatacatattagatatatttttatatacatatatataatttctttgggagtttggcataaggataaaattatttggatttcataatttcatacattctaagtcacaattttcctatacttgacacattgcctagtatttgatgccctgttattggagacaatttagcactgacacagactagcatggcgtaatagttttcttttgtacaaaggccattgcaaaatttcagtctggggccaaacatccctgtagttattttttttaatgtttcataagttgtaaacgttgataccaagtatgtggtgggtgttataaggctttgccctttgtccatttcaaatttttcgtaacaacctgcacggtgaatttctcgagtctttcttccaagagcaaagagtctccatgccaacacatccactttcatcctttggccttaacaagtaagcttcacattggcgtgtgttaagaatcacattgataaccacagttgaccagaagacctacattactatcaggtaccttgaggagtctagtctctgatgctaatatagaaatcataggtctcaaagagctaatgcggtatttgaatgagtcattgcatcttgaaaaatcacagaagtcactggtcatgaggcaaattgtttccatttcttcgtaagccacaattatatttgcggtgtagattcggttttgcttcttagcatttttatgaagaagctacttaatggaaaaggattcagaaggcctattcttaaaactcttaatgaccacaatcagcagtagaatatatcagatttatatctgatggttgactattgtactatccatatttagtaaatcactgctctaatgttctcaataataataccgtggccatcagaaatagtttatactcttttccaaattcctgacatgtaagaaacgcagtaatactaaaagcttctggtacctcattgtgttggcattgaccttaccttctctctgtggctttccctttccctaatgtaggtagagctgctgtatttcaggcaagcactcaggtattgggctattttagttgggtttttgctttttattgatttggagttttaaaatcttcttctaccacgaactctacccctgacaaacggtgagaaaataaatagaattgctagtcttcatcacacggaaaagagctagtgagctatttcgtttcctccctttttctgcccccttctcttttcccagcttcccatttatagccctgctttgcagagacagcaacagatactctagaagcaggatgaacatgagagtggatttacaacatggaaagcaaaggccatgcattcctaaagggcagggaaggccttaagggcagggctttgacttttcaccactgcctcctctgcctagcacctgcatgcagtgggcattcaactaatatttaaggcagaacaggaaggaaaggcaaaaacttgggaagaaatatacaactgaggagaaaatttccagacatttcactgtgaaggtgtcagaaaagacagttctctattttcagccatactaagtggacattctacttgtattattctgtgaattttctaattgagtcatgaaaattctttcattgaaagcacattcttttttagtactttgtatttttcctcataaaaaagatttcctctaacataaatgcataaagcaatagaaaatcatgattgagatgacatggcatgttttccacatttcaattttcaatactttgtatctatcccagagaattctttccacagcacacttttcttatttttgttattcatccagacctgaattttttaatacattcagcaatttttatcaaacatgagtgattggagtttttccagacaagtaatgtttttttttcaagtgtgagattttgtgtgcgtgcatgtgtgtgtgcgtgtgcatatcttctgtagagttatagaaagctcagttttaaaaggtggccaaaaaaatgaatcaatgaataaagtggaattaagagtcacccgtaaccttgatgctagtggtggtacagatgtgtacatttgtaaaacctcatggaactgaacagttaaaattgatacatttattgtatatacattatacttcaataaaatttttaattaaagaaaataaaagctcatcttcatctgggctttacttgctagtccatgtcatggcggagcttcagttcttaggaaatcttccattgctatggcccttgctgttccctggcaaactccaactctcagggatctctacaatgccctggctttcaaaagcacaggagagaacccaagcaagcctggctgctttgtgctgctccttagaaacgaatttccatgttcttgggccacagaatagtctgccattcaaataagcatctctggctgggcatggtggctcatgcccataatcccagcacaccaggaggctgaggcaggtggatcctttgaatccaggagtttcagaccagtctgggtaacatggcaaaaccccatttctacaaaaaatacagatattaactgagcatattggtgcatgtctgtggtctcagctactcaggaggctgagataggaggatctcttgagcccgggaggtcgaggcagctgtagtaagctgtgatcgcaccactgccctgcagcctgggtggtgaagcgagaccctgtctcaatcaatcaatcaatcaatcaaatcctgagccatatcactctttttatcaaatcactatgccacaggatgagattaaatctcaccacaggatctcaccaaaatcaggctctccaaacctctgttcccacggcaactccagatccagtcccatctcaaatgctgtctctaaacagagagatgcagacagagatgaggaactaatcaaggtgcatgtttctgtgtctggaagtaggagcaggctggaagagatgggcacagtggaagtcattttggtaccttcctttttatttactcccttgggtctgagcaggcaagacttgtcttggcatgttttctatttatataactaattgcaaattaattgcaccctcacattgttgtctctattggagaattgctagaggactcgagttagggatgattcactttctcagaagtagactaacataattgcatatgtagttactaaagttagttataggcacagatatctgagcctaaaggaagtttgtcaggaaccaaaaatctatcagacaccctcctacactccatgcctctcctatttccctgtccactaacatctttagcacagctgaaagagggagttcttctaggtcttttgcttttcattttctctaccctggaaatgttgaaagctgtatcaagctgaagaagcataagctgcaacaaagcttttctcccccaaggtggtttccaaagtgaatgaccactggctctttctaagtattttatcctctagtacttacattcatacctattggtatgaatataccaacacatgaatgtacacatggacaataggtaaacattattgttctctctacatattattccgatgctttatttatccaatacaggaaaagaaatctattggtagatgtaactgaattgaaaagtccaaggacagacttatcttcaggttcagctacccaagatctcataaaaggctgtcagcacttggcttctttctccccatctctcgactgttttcttcattgttggctttgctctcaggcacgctcttccaccatggtggcaagatggctgcccacagcatcaggcttacttccccctcttctcagctactccacaaaagagggatcctctcattttaacattttccacagaagtcctaggatcatctcaggttgcttttatcgcggtatgtttttaaccatacacaatcactgtgcccgaggggatggaacgttctgatgatccaggcctgggtcacatgcccctctggagtccagagtggagtcattccacctgaaccacatggactgagagtgggcatggaatgattcccaaaagaacagaaggctgtcaccaggataaagtaggacagatgctagactggcaaaagcagcaactttcttccactgtctcaactcggatcacaagggaagaaggaaagataggatcaaggatgaaggagaaaagtagaagctgttgccacatattcacaagaagtaggatgagtaccaaatccctaaaaaatgttctgtcaaaccagtacaccaaaccctctctgcttccggtctgcttgtcatttgacccacaggcttcaagaatacttcctcaagtaaatatagtccagtgattcatccatcagataatcccatataaaggaaaaagacaagagagacaagaattatgtctgttttgagaccaggatggtctcttggctgttgcccaacttcctttgggtttggctgcatctgtccctcactttagagctccacgtgtcattgtgtttgtctttccctgagaatgtgaataatcccaagtctaagtcatccagcatttctcagagaggtgacatcaatgtagacccaccaaggagtagcagttagacatctagaatataactaggacaagacaaaaaactgtttagagagagtgtacattttagtgtattttgtataagttttttcaatgaacatagtccatacattttgggaaagtggtaataacttgcttcatttccatctggaggaagcagatttttggaggagaaataagcctctaaacatatttgaatatttgaaagactgagaaaagcacatgagaagttatggaatcaagaataaataaaaagttggggcaggaataataataactgcctaccattatcagtcacttaccacacccatgcaccatgctgagtgctttacagactttctcatttaaccctcctagctactcagtggaagcaaataaccattactatcccaatttgacagaggaagaaacagactgtcttacagaggaaacattcgttcattggaaacccagaactgttgttcctaacctccctgatgtctcatattttgatgctcattgcaagatctgtgttgatggacaggattgctgagctcaaggttggctggaacctaaacacagacatacaaggagggaatcaggagggaccccagtcagatgagataaaaagagaaggtctggtggttcaggtcactgaagaaaaggaagctgtccggtttggataaaaattcaatgtcctcacaggcagaggagagcaaagcctgagaaagaatctcataaaagacaaaggcaaaggttctgttggcatcaggatggtccagcagggaacgaagacacccaggcatggacattaagattcaaggctaggatctcatttaatggtcacacctagacaaagtggaaggataatcctaccagtgatgatgtcttacagtgtgtaactgggctttgtcagttacacagtgctttttcatacttccctaattttatcttctcccagcaggcctaggagcttgcttagtatcataattcccacttccgagtgaagaaaataaacacagagaagtttctcattcaaagccaatggcagagctggaacttgaacccaggtgttttgcctcagagcccagtgctcttgtttactatagtgggctgagcgtaacatcaaggttgacttgttcattggaattgctgtacgccttgggagcttggtcattaggcaacaagcaagatgccagtcactgggagagaaagggatgaggctgaaactcaaatgagtacccatttaaagaaaagaaaaccccttctttcccacaacaggaatctccagcgaacatccactaataaactttatattgggtgcctaccatgagccaggcactggagagtgaacggtgaactcggtaatagtccttaccatcacagagctcacagttcgttggagacaccagaaaacaggtgattaaatacaatggttattgattccatagaggcagaatgtttcccatacaactataatgcctgcgttatatttaaggtttttcatgatcttatatatcttaccatataaatctaaatcaatcataacgtatatttctgagatgattactcagttagctcataggaggggcatctgattcagaagtaaaggatcaggaagaagcggcatctggaacaagtacagatggccaaatcaagaacctttctcttggcctctgagctacttgcccaaaccgaactctgtcttcaaggttcccttaatgcagtccccttgtcagaagccacacctgcagcagatgccccatggcactgactcagccttgagcagaagcactgtgttttgtctttcatctcattgcccagctaggtgcaacctggatagacattgtggcccataccttttttatatactttatatttgggtttttaattgttgtcaccatcaccaaccaaggagtaagatggccctctgggtcagagtaacattagaagttttgtccatccagttttagaactacagaggaaagaggagagcattatttttttaagagtaagcatttgatttctgaaagcaattctgattgcctatccctgacaaatgaattgttccccagaagccatttctttctaccagaaaaaatactagagaacaacaagtaaatttaaatttagttatttttccccaccttgattgtccatgttattattgtttaaatggtggtgatgaaggtaattaactttttaattcattttttggttgtagttgatgcattttttaaaaccccaactgagtgagtgccacaattacaaatggctctaagactgctaaaatttcaatgggtatttttcagcttctggttttgccaaattttagttcactaaaccacacttaaattaatttgctaagtagaaaattccccaatgggatgttagtgaaggataagtatgttgtaaataaaacaattaaagggctagttcacacctcatcaaattgcttaacaacctgataccagttaactacatacattcctcataaactgcatggaacatggaacaaggaggtaaattagagtcccccttttctgaagtgggacgcaattacccttaaactgaggtccagtattacggtggcgagaggtggggtagaaatgccacagtatgaccttgttggctgtggaaatatctgcataatgctgtcaatagggattgcaaattctgatccagaaatcccgttaggcagagcaagttccccttcctaattgtagcctcatagacacaagagtaatataagatcatggattcattttatcccaacattcctccaatgtgctgtcacccatatcatttcatccactcttatgagaagaaaagcacatattactttacagatggagaaaccaatgcacagataagtgaagaggcccagtcagggtcacacttgcagagggcaggctgaagggcagcaacgtgagctgagttcatcttggcctggagcctgtgtggtttctggcagggccatgaaattataacccctgtcaactcattggaggccacctacacaaatgccttcattttacagagttgaagataaggcctgagaaagtaaagtgacttgtctgaaacttcctgggatatgacccagtgtccggagctcctatccgaggtcccttctcacttctgcagcagtcgcttgcctggagttatttagggataatttattttttaagatgtaaatgtgaaccaggtaaggtgatggaaattttagtctgcctctcaggacacttcccctctttaaagtggggaattgggatggcacacacctattagcagaggatgcaaactgaacacaatgatgtggaaatctagagagcaagatttattcacatgggtcagggaccatgtgaataaacccaaatagctataggggcacatgggaaatgtcagtgagagaagcaggtgggagcagagcctaaagaggacaaagtcccttcctcaagagcatagcttcacttgaccatgacctccaaggaaggcaagtcctgagattaaagaaaagcaggaaaactgaatttttatgtgaaagcccttgactttgaagtgtcagcaactggctgaaaattttttaaacagtgtgttggggatgggagtgtataaaaatgagcctacagattgcaacctctgttagaggatttcctaccctgacatatcagtgtagagtaggacatttagggtccataccactcagccataaagtttggatttgtttacaaatgtatttgcttgttcattcaaggtctttggacaatcaccttatactccacatagaagatccaattttatttttattttttaaagactgagtgtgacttcgaactcagaaaatattgagggcctcagtatgattggtccttttgtttgtttattcacttttaaaattcagtttccatcacaaccctgcaaggggaggaaaggcagtcccaatattcccattttacacatgaggttattgaggctcaggaagggtattttcatgaagtgcctcgcacaattcaagcccagtcttcacctctgagttgcacactctctcccagtgcactgatgcacccagagatccctcagaactgaaaactgtgggagcacctgcccaccatagaggacaaatgaacctagttccagaacaggtgggcaggttttgaagcctcaggtccataaagcaaaggcagagcctggaattccatctctctgaagttcaaaaaccagctggcatggggcaaacggtaaataacattttattgggtaatggctctttagttttaaatcacttcagcatttacttttaattaatttctttaaattagacgactcatacttgtaaatatttgcttttctatgataagcttttatttaaattattaaagctgcagcttcgtgactgattttaagaattgaggttgccgctatactaatgatagaaggcatgtgattaaaaacaaggaaaccatttcacattggtatataaaccaacaccaaatatggctggagcaaagcagcactcaaacaaatagaagagagggtgaacttacagttttctttgatttgttcaaggaataaatcaataaatcagggagttagagaacaatgtaggatgaaataacatctaaaggagctcactcacaataaaaccttgtcttgctctctcttttctaaaagcactcatcaatggccctggacccacatactagtttgctaaaaggagtgagagtaggtcatgggaggggggttatggagaggctcaggacagtgagtaactgtacaagaacatttgagacaaaaaaaaaagaagaagtaatgatgagagcagagtaattgcatagccctcatcagtttgggttattataagccttgatgtgctagctgctccattttaccagcatcaaaggcaagtatggaacccacagaaggtaggctgacaggctggattacagcaaaaggagaaatgacaaaggatactctaatttcaataaaagaagatttgaatgtaaaaggtttgtaattacattaataaccagtctttaccaaccatgtaatgatcagccagagtaagaagagaccaaggcaggatgggggaaattcaccacaagtcatcaatacctaagaacctgttaataacttttattatttgttgaaaatcatcttgacaacacagttcagtaacctttgtgctataaatccatttcatctgcaaaaatgaaagctgaatagaatgtgatattatatagaatctctcatgctgatgctatctccaaagtgctctgccaaataatgagctggattctggatgggagggctgtggggggccaacagcagatacttgtgtatgcctaccaggcccagcttggggctttggaaccagcttagcatagactgaaatgaaggctgaaagttacccttcaccctttactgaaaattatcatggggtgcttagattctacatcaaaattaatagagagaagccaaaagcacttccatttattatctggtggaaactggggaatggatcccattgctttggtgctgggtatgggggagaatgttagaataatcatccccaaaatgtatgtaatcatgtttgtggccaaatagggtaccgtaatccaaataaaccccaggtggcactctgggaccaagctatgcctccttcctgccctccctgcaattgagaggggtaccaaaaagcccagggcactattgagagaaggatgagggaagcccttttcacaggaagctgacatggagatgagatagtcagaattgggaggtactaatgtcaaatccttcctacccagaagcaaactcggcactcctcatttttacattggtccctgatccatttatcttttgactaccttatcccaattaaactactaatgtgctcatttctttttttttttaatttttattataggttcagggagtacatgggtaagttggttacctacgtgtattacataatgctgaggcttggattacaaatgaatgtgtcttccaaatagcgagcataaataggtggtttttcagccctcactctctactcttgtagtccccagagcctattgttctcatctttgtttgtgtgtactcaatgtttagctcccacttaaaaatgaaaacaagtgacatttggttttctatctctacattagttcacttagggcactggcctctggctgcatccatgttgcttcaaaggacatgatttagttctttttttatggctgcatgatattccatggtgtatatgtaccacattttctttatccagtccagagttgatgggcacctgggttgattctatgtctttgctattgtgaatagcattgtaataaacaaagaggtacgtgtgtctttttggttgaatgatttatttacctttgggtatacactcagtagtggaattgctggattgaatggtagttcagtcttctttgagaaatctccagattgctctccacagtggctggattaacttacattcccaccagcagtgtatgagtattcccctttctctgcagcctcaccagcatctgtcgtttttagactttataacaaaagccattctgactgtgtgagttaagggacaggtcacttgccttgaagggaaaccccataaggctagtagcggactttcagcacaaaccttaaaaaccagaagagactgggggcttgtttacagcatccttaaagaaaagaaattccaaccaagaatttcgtatcctgccaaactaagcttctaactgatggagaaataaaatccttttcagccagagaaatgcaaagggaccactagacctgccttaaaaagggaatgttaaacatggaaacaaaagaatgatgcctgccaccacaaaaacacacttaagtacgtggcccacagaccctttaaagcaactacacaatcaagtccacataacaattagctaacgccacaatgacaagatcaaatcctcacatatcaatattaaccttgaatttaaatgggctaaacactcccgtttaaaaggcagagagtgataagttagataaagaaacaagactcagctgtctgctgtcttcaagggaccccctcttacacacaacaacacctataggttcaaagtaaaggaatggcgaaagatgtatcttgcaaatggaaaacagaaaggagcaggggttgctaatcttctatcagataaaacagactttgaatgaacaaccatcagaaaggacaaaaaaaaaaagcattccataatgataaaaggttcaatacaacaagaacacttaactatcttaaatacatatactcccaacattggagcactcagattcataaaaataaattcttagagacctacaaagaaacttagccacacaataatagtgggagacttcaacaccccactcacagcattagttgtttgctattgaggcagaaaactaggaaagatattctggacttaaactccatacttgacctattggacctaataggcatctacaaaatactttacccaacaaccacagaatatgcattcttctcatctgcacagggaacatacctaagatcggccacgtgcttggccataaagcaaatctgaatacatttttaaaaatctaaacatgccaactgcactcttggaccacactgcaataaaaacagaaatcaataccaagaggatctgtcaaaaccacacaattacatggaaattaaacaacttgctcctgaatgacttttaggtaaagaatgaaattaaggcagaaatcaaaaaattctttgaaactaatgagaacagagacacaagataccagaatctttgagataaagctaaagcagtgttaagaggaaagtttgtagcactaaatgcctacatcaagaagttagaaagatctcaaattaacaacctaatatcacacctacaggaattagaaaaacaagaacaaaaccaaccccaaagctagcagaagaaaagaaataaccaaaattagagcagaactgaaccaaatggagacatgctcatttctttcaacagaaagtgaacccagaggttcatgaatatgttatataaacctcacttagtattataaatttagggggaatagattaccagatgtaaaaattttttaaaggctcatggtagatcttacattgaggcacatgcaaaaagctcttaccaattaggttatcagtatttaaatttcatagcactacatctaaaaagtctaatgttcacacagttcccaaaagactgaattcacctgtctccagaagttgtattatcatgccagtggtctcactgcctgatgagtatagaagccaataacatggcaccaacatttgagaaaaggaagtctttattgcaagaccagacagcaaggaaaaaggagttgggctcaaatctgcatccccagtttgctgtctggggcaagttttgaggtgtcagagggcaagggaaaagatttaggaatgttggttttgtagagtctcattggagagcttcaatttcgaccatttacattaaggtatgttgaggcagattttagccctggatttttcaggccaacagactcttcacttctgaaagagtttctgcattcaggttccagtcacgtatgaatcttcttggttctgtagggaggaatcgttggttctgggtgttgttagaggtcaaagctttctctcttgcacatgcctgggctgcccgacttacagttttggctctattttacctacatggtaactttattctgttatcaacagagtaggcccagtttgggctggtcctatggttacagtattaccatgctttcatccgagagtgtgatgtcctcaaaatttcttcaaagttggtaagcaactggctatagaattcagctgtccttcagagtcacatgcactgatgctacagttctgcactgctgacctgcccttctctgaagctgaaccacaacttttcctgcctgtctttgaatcctaatatactattactattggaatggtccattggaaaagggatttgagcctaaatcaagactgcagcatgaaagtggacagccatgaatagctaagagaatatttgctagaacccgatgtatgactggagcagggatgagagagaagtctagatttctagtgggctaactgcacgaatcatgacattctccaaagagaccgttggaggagcagcaggtttagggagaggtgattggtttaattttgtactcataaggttgaggtgcctagggaacctccaagtagagctttcccacaggtaatccacatcacccccatgttcctaatcctactgaataaaaatcacactctttgttgttggtggtgttgttgttaactcagttggttttcttttctcaggtttagtcttttaagttctaggatacatgtgcaggacgtgcaagtttgtaacacaggtaaacgtgtgctatggtgggttgctgtgcctatcaacccatcacctcggtattaacccctgcatgcattagctgtttatcctgatgctgcccctcccactgccaccccgacaggtcccagtgtgtgttgttcccctctctgtatccatgtgttctcattgttcagttcttacctgtaagtgagaatatacggtgtttggttttctgttcctgcatcagtttgccgaggctaatggcttccagctccatccacgtccctgcaaaggacatgatctcattcctttttatggctgcatagtattccatggtgtatatgtaccacattttctttatccagtctgtcattgatgggcatttgagttgattccatgtctttgcaattgtgaatagtgctgcagtgaacatacatgtgcatatatcttcatgagagaatgatttatattcctttgggtatatacccaataatgagattgctgggtcaaatggtatttctggttgtgggtctttgaggaattgccactgtcttctacaatggttaaactaatttagattgccaacaacagtgtgaaaacgttgctttttctccacagcctcgctggcatctgttgtttcttgactttttaataatcaccattctgactggcataagatggtatctcattgtggttttgatttgtatttctctaacaatcaatgacgttgaccttttttctcatatgtttattgaccacataaatgtcttgttttgagaagtgtctgttcatgtccttcccccactttttaatgggattttttttcctgtaaatttatttaagttccttatagattctggatattagacctttgtcagatgaatagactgcaaaatttttctcccattctgtaggctgtctgctcattctgatgatagtttcttttgctgtggagaagctctttagtttaattagatcccatttgccaatttttgcttttgtggcaattgctttcgatgttttcatcatgaaatctttgcctgtgcctatgtcctgagtggtgttgcctagattttcttctagggtttttatagttttgggttttacatttaggtctttaatccatcttgagttaatttttatgtaaggtataaggaaggggtccagtttaaattttctgcatatggctagccagttttcccagcacatttattaaataggtttctagtaggctaattgcatgaatcttctagatggggtcttctagatatagaatcatgtcatctgcaaacagagacagtctgacttcctttctcctatttaaataccctttatttctttctcttgcctcattgccctggccagaacatccaatactgtgttgaataggagtggtgagagggggcatccttgtcttgtgccagttttcaaggggaatgcttccagcttttccccattcagtatgatattggctgtgggtttgtgatatatggcttttattattttgaggtatgttccattaatacttagtttattgagagttttgaacatgaaagaatgttgaattttatcaaaggccttttctgcatctattgagataatcatgtgatttttgtcttcagttctatttgtgtgatgaattacatttattgatttgcatatgttgaaccagccttacatccccgggataaagctgacttgattgtggtgcataagctttttgatgtgtcgctggatttggtttgccagtattttaatgaggatttttgcattgacgttcatcagggatattggcctgaagtttcctctttttgttgcatctctggcaggttttgatattaggatgatgctagcctcataaaattagttagggagaagtcccttcttttcaattgtttgaagtagttttagaaaaaatggtatcagctcctctttgtacctgtggtagaattcagctataaatccatttggtcctgggccttttttggttggtaggctatttattactgcctcaatttcagagcccattggtctattcagggattcaccttcctgattcagtcttgggagggttatgtgtccaggaatttatccatttcttctaaattttctagtttatttgcatagagctgtttatagcattctgatggttgtttgtatttctgtggggtcagtggtgttatcccctttatcattttatattgtttctatttgagtcttcttttcttctttattagtctagctagtggtctattttaataattttttcaataaaccagctcttggattcattgattttttttgaaaggtttttcatgtctctatttccttcagttctggtcagatcttcattatttcttgccttcttctagctttgggcttgtttgctcttagttctccagttcttttaattgtgatgttagggtgtcaatttgagatctttctagctttttggtgtgggcattagtgctataaatttccctcttaacactgctttatctgcatcccagaaattctgctgtgttatctctttgttctcagaggtttcaaagaacttcttgatttctgccttaatttcattatttacgcaggagttattcaggagcaggttgttcaatttccatgcagttgtgtggttttgaatgagtttcttaatcttgagttctaagttggttgtgctgtggtctctgttatgatttcaattcttttgcatttgctgaggcatgtcttacttccagttatgtgatcaattttagagtaagtgccatgtgtcaccaaaaagaatgtatattctgttgttttggggtggagagttctgtagatatctatcagatacacttgatccagatccaagttcgagtcctgaatatccttgttaattttctgtctccatgatctgtctaatattgacaatgggttgttaaagtctcctactattatcatgtgggagtccaagtctctttgtaggtctctaagaacctgttttatgaatctgggtgctcctgtattgggtgcatatatatttaagatagttagctcttcttgttgaatcgatccctttaccattatgtaatactcttctttgtcttttttatctttcttggcttaaagtctgttttgtcagaaaccagaattgcaacccctgcttttttctgctttctatttgcctggtaaattttcctccatccctttattttgagcctgtgtgtgtccttgtgcatgagatgggtcttttgaatacagaatacaatgggtcttgactctatgctgcttgccattctgtgtcttttaattggggcatttagcccattttcagttaaggttaatattgttatgtgtgaatttgatcctatcatcatgatgctagctggttattttgcagacctgttgatgcagttgcttcacagtgtcattggtctgtgtatttcagtgtgcttttgcagtggctggtaccagtttttcctttccatatttagtgcttccttcaggagctcttgcaaggcaggcttgctggtgacaaattccctcagcatttgcttgtctggaaaggattttatttctcctttgcttatgaagcttagtttagctggatattatatcctgggttggaaattcttttcttttagaatattgaatattggcccccagtctcctctggcttgtagggtgtattagtccattttcacactgctgttaaagacatacccaagactgggcaatttacaaaagaaagaagtttaatggacttacagttccatgtggctagggaagcctcacaatcgtggtgggaggcaaggaggagcaagtcatgtcttacatagatggcagcaggcaaagagagagagcttatgcggaaactcccattattaaaaccatcatatctgatgagacttattcactatcatgagaacagcatgggaaagacttgcccccattattcaattacctcctactgggtccctcgcacaacacttgggaattcaagatgagatttgggtggggacacagccaaaccatatcatagggtttctgctgacaagtctgctcttagtctgagaggcgttcttttgtaggtgacctggcccttctctctggctgctcttaacattttttccttcattttgactttggagaatctgatgattatgtgtcttggggttgatcttctcagggagtatcttaccggtgttctctggatttcctgaatttaagtgttgtcctgtcttgttaggttggggaagttctcctggatgatgtcctgaagtatgttttccaacgtggttctgttttcgctgtctctttcaggtaccctaattagtcataggttcagtcttttcacataatcccatagttctcagggaatttgttcattccttttcattctgttttctctaatattgtctgcctgtcttatttcagcaagatagtcttcaagctctgaaattccttcctcctcttggtcaattgagctattgatacttgtggttgcactgtgaagttcttgtgatgtgtttttcagctccatcgggcatttttgttcatctctaaactggttattctggttaacagctcttgggattttttatcatggttcttagcttctttgcattgggttagaacatgcttctttagctcagtgaagtttgttattacccaccttctgaagcctacttctatcaattcatccatcccagcctctgcccagttctgtgctcttgctggagaggtgttacaatcgtttggaggaaaagaggcactctggctttttaagttttcatcgtctttttgttgttgttgttgattctcatcttcatgagtttatctagcttcgatctttgaggctgctggcctttggatggggtttttatggggttttttgttggtagtggtggtggtgctattgttgttgcttccttttagttgtgtgtgtgtgttttgttttgttgttttttgtttgtttgtttgttttaacagtcaggcccctcttctgtaggggtcctctccagaccctattcacctgggtttctcctgcacctggaagtatcaccagtggaggctaccgaatagcaaagatggctgcctgctccctcctgtaggatctctgtcccagaggggcatcgacctgatgccagcaggaatgctcctgtataaggtgtttgggaacctctgttggagggtctcacccagtcaggaggcacgggaactgggacctgcttaatgaagtgctctggctgccccttggcgaagggagtgtgctgcactgggaggaatcccacttgtccagactgcccggattcctcagagccagcagcaggaagactacatctgctgatccatggagatcacagccgcccctcctctcaggagctcagtcccagcgagatcagagttctgtccctaaaatcctggctggagttgcttaaattcctgcagggaagacccagttggtgaggagggatggatcagggtccagcctaaagaggcagtctggccacgatccgccacagctgctgtgctgcactgtggggaattcctcctgggtccaaaccatctagtctccctggcgccagcaggggaaaaatggcagactggagccacagtgatgacagccacccctccccacaggaactcagtaatcttaagcagtctgcagccaagtggccaccaagaatctacacagctctgttcttgggacccagggctctgatggcatgggctcacgagtgggatctcctgatccatgggttacacggaaccatgggaaaagcatggtttcccagatgaagtagcacagtcactcactgcctcccttggctggaggtgggagcttcccttgccccatgtggctcccaggtgggctgtcacaccaccctgcttttccttgctctccatgggtcatgccacccacctagtcagtcccaatgaaagaacctggatacctcagtagctggtgcagaattcacttgccatttttttcttctcagtgggagcctccgaccacagctgtttctagttggccatcttggcccctccccaccaaaatcacactctttaatccttcctatgctgcccctggtatttaagacccttcatgatcaggctccagataccctctctagaccaaccttctgcttcttacttgcctgctcttgacaagccagcatcagaggaatgtctctgtttccagaacactttccaaggctgttagctctgtatctttcctcctgttgtttatctcttcagatgctcaggataactgacttatatttatattccaggttatttgcagagcaggtaacacgtcttacaaacccccatagccacagggattccttaaagctgggtgccagctccacctgcatcagaatcacctgggcccttgagagaaatgtaggctcccagacccctttcagaccttttcctggggttgcaaccccagaatctgtgttattcaataaagactcaattgattcttagtgatgccaacgttcaaggtactagacctggaacacagggtcttccaaacggaaccgcacaaatatctgtttgattttcataaagggcaccaagaaactttgctttccttaagaaaggcacctcaaggtctctgaatgaaacttcccacatggaatgttgtttgtgctctttctgcaagcaccatcagcagtttcagcttcttgggccgctaacagccaaagtacccattggaaaaaaaaaaaaagaagtctctttttagtgcattagatcctgttttttagaaatgtgtttccaaatataaaccaatttctttcacccggtgccagcaggcaccatgtgagcagatgagaagcaagtgaggtcagagactgcatggtctaacttagtggtcaggcatgcagcctctgggtctgtctgtctgcctgggcttgaactgggctctgccactaccagtgtgactttgatcacattatttaacctctctgcttctcggtttcctcatctgaaagccagggataataataatgcctacctggtaacattgttatgaggaataaatccgtcaaatggaggaaacatttaggatggaaactaacttgctgtaggcacttgggaacatgctgctgtgctcagcaggcttatgaatctttgcaattctaaacccaatgtttgaagctggttactgagcccatcaagtagagtggcactcttccctgcacttacatttctgcttctgaatttcagagtaagacaattgccgtggcaggattctcctgtgtcttaatgaaatcatgacatggaggccctctcccccaacacccatacacacacacacacacacacacacacacacacacacacacacacacacagaggcatgaagatggaagtgtttaagtctccttcgttgtactccttgcccttggtgaagagggattctaataatctaatgatcataggtagtttacatcaaaatcttcctattgcacaggctttagaaattaatgggaggggaaaggggtcaggtaaagatgtggccatgatgcataaatatctactgcaaaaattgcatgtgctactctaacatatatatgtaatctaaaatagttagggaaaagcagacttcaggaacagtatattttgcccctagagtgttctgtctccaggtagcaccttgggcaggtaactgtgtagtggtttttcctaaggggcaggaggaaatcaggaccttacactgttgaacctgttagcccccaaagtctgaccttggaattgaaccattgtctgctacatgattatcagacgaaatccacagtgtttagatactgaaattctaggaccacagttacaatagaaagagagagagatgatttaaggggcctatcaagttaggatgatttgttcctttggttgccattctctttaaacaaagcctgttctgtggataaacagaccatggggtaatgatatgcaggtatcgttcaaatggattgcatgactgttttttgtggccgcgcaggatagcttctgccttccccaagatttccctctctatgttgttctcagttatcttttctaattgttctcagcacccactttaaaaacctctcatcccctcataaaggaaattattttagcaggaccatttttaggaccatctgataggatgaaacactcttaaggaccattttccagataatgtctgctgaactgtcatacagaatccaaaactcattgcacacgcagtttgttaataactcaattcttgtatttgtggtcattgtttaaaaaaaaagaaggaattaaatatgagcaaccaaaattatacttgtttaaactgtttgagaaatgtctttgagcactcagtcactatcctttctccttcattttctgtacaaacatttccttggtgtgtatgagggccacaagcatctgctgctgcacactccacccattccagttctttggaaagaacaagacccccctcttctcataacacaatgggaaatgtgagtgatgaaagcggatttttttccataatcatttctataatataggccatcaaatgatcattatattttatgattccgtaaaatctgccgaaatcaaagctatgtaatatacgttgcagagggctctgctaatccttgccaaccacattcgtgcctggaccgaggaggaaggtctggtaactggaaacctgacactaaaggaattctaagcacagactaaaagcatctctgtgcacatagcatgggcgactcaagtatattagtttgtgctgattttttttaaagctttgcagtatttgtagaagaaccagagaagaaagcaccgaccccagctcagccactaaataatctatgtgtggcatgctcaagaatagcatggctctgccagatgtcgactttctgccaacgggtacaggcacctctcttagacagctcacaggagttttacatcatgttacttcctgccgttcaaaccccaaatttggccacagtcaattattaccaaaaaaggaaacccataaaggctactttggaagttaaaaaattagctttgttttggctgctaatcacacacatagtattttatagaaattaagaacaagattctaccctttggaaggttttctgtaagtgaaaaacccaatgcatatgcctaagccggacattcacacctctgctcataaattcttcatggtttttatactttctgctgcatatcttatttcttcacatactaaactcaccccctttcaaaacaaactatcttctagttgctgatgtgtctccaacttagttgtttttcccctctgtgactcttcaacttcatctatccttccacatcctaaaaggagctcatcagatgagatactgtaggagttcttacactctgccttgagacatgtagaggaagtgtgctcagttctgtattgcaagaatctgtcactgatatttgaagacaggattacaaatgatttcttttaataaattatagcagactcaagttttccccttcaataatgtcactcccactcatttgaattcccttgttctttcctggatggaaggaaagggtgttgagttacagcaggtggcagagaagtttgcataattctggattctgcctctcctgggtatgagtagcttatatgaaaatcatccatcacgtctgttctcagggagaaaagcttgggaggcactgggacagagggaacaggacaccaccttgacctcgggttcgtgttcatcagccctcaagcccaggtaccacacttgtaactatggtcatcacacctgggtttgacattgtctccctaagaccctgtgtttgaaatcctgtgtactgtactttgaaatacataaagatgttcctagattattgcatttatgacagagacaaagaaaatttctttgctgtaccatcataaaaatagtagttaactgacccttgaataaatacgcttagcctgtacctagtaagcccagtttccagttaatcttgagtcaagagagctctcaatttcctcagcaccagttagtcatgctgagctcactgggaagtcagagaaattgaatcccagtgtaagatttattgagcacctattgtatttcaagtactctgtagggcaacagagataagacagtataatcttgttcttggcaaacaagacaaataaaataacctctaccctgataaaatttacagtcattctgtgttggacccaatacaaccctttattcagcccaccatccctcctacttccttccttcttcagaatttagaaatcagtctcacctcaaccaccatcaatccctggctcccaaagaaagcccactttctcctcttttcccctaccttcctccagcccctacccacattcaaccttttatagttactgtatgtgtgtgggttttctctttactttaaactctcttgaacaaattcaacatacatttgtagagcacctgtgatgtgcaaagccctgtgttaagctcgaagggagatagttagatatgtaagactcagttccttccttcaagatgcttgtactccatgcagtatacaaccagccacaaggcagggtgaaagacagatgaggtgagaatgaccagctgtggcagagacagaggagagagattttctttgcaattgagggtggtggtgtagacataggaggattcaaaattgctcatgccccttcatctgttccagtaagtacagccacctcattcctagcaagaggtttgctattaattttgtccttccagtattgagccctttccctatacagaattgttttagcaaatgtaggaagatgtctttcatccttgcgtaaactgaaggtagtcagcacccagagctggctatctgaccagcttagtctctgatttccagccccccttttgcttaatgaaaaatactgacatactgacatggcaaaaagaagaaatccttatgtaaacaaagtgatgcttattgcttctttacatgtaaataacatatatctttgtcgtgttcagacttaatggttaactttctttattgcgtgcatctatgtgattgaaaactgcatgcctgagatagttcctatcagttttccaagcaaaatctgaatccttctggcctctggaaatgagcctaatccgaaataaaataagcaataatttcaaaatataggtattttcatgacagccccctctacgagttgtaaagaaaacaaatatgggcttgtttctctttccttaagtaaatatggtttctgagtaaaatttttaaattgaaagtttttaaagaaaaacagtaacatatacaaacaaaactcaagaagtcacatgaaaaatgaaaggtcttaaaatactgatacatttgttatgcggattcttgttttaatcagaatctcctaaggaagctgcccctggattcctcagggttggctcaaagcacacagcatccgacaccgtgatgagcattgctggggccccagaatggattggttttgggctttcctacaaacactaaatttcacacaaataaagagactatgaaaagagaaactcacgattaacaaaactaaaattttagctgccttttcttcctctaagttctgtagttgatgaggaggggcttattttccctgtttcaaaattcttcttgagacagagtctctttctgttgcacaagatggagtgtagcggcacaatctcagctcactgcaacctctgcctaccaggttcaagcaattctcctgccttagcctcccgagtagctgggattataggcatgcaccaccacgcccagctaacttttgtaattttagtagacagggtttcaccaggctggtctcaaactcctgacctcaagtgatccacccaccttggcctcctaaagtgctggaattacaggcatgagccaccgcccccggccaaaattagtttttttaataatttaaaataatacacacataatagtcagaagaacttagaagttgttctgacaaaagtctgtaggaaattctgttatgaacaaaatgttgttataaacaacagctacacaccatcccccaaaataaagaaaaattcttctagcactctttgaaccttaaacagtgttttagtaggccaactcattgtttttcttctctctgaaaaattaaaaatgctaactgttatgatgagttccacagaaaaagacaatttccatgacttcatttcttgacaaagaacagctacctctcttgctttctgccacatacaagcaaactcccagacataaaacctcccctcagaggaagcaatatgggaccacaaaagtatcttgaggtctgccctatctgcccacgggaagcctccccctcactgtgagctgtgagcactggctgcctgggaggagcaaggtgtgggagaagagatagcgactgtccccccatgtgctcgccgactgtactgtcacaacctctcagggtggcttctgccctgtcaccacttgatctggattctctctccaaaaatttaaaaaaacaaggcgtgcctgtcttttataatgctctgttttaagagagagaaatctccagggagagaacaggaccctaaaagtccaaggcctggaattcttcctttctctctttccattttaaacaggaagcattcatgctaagagagtccggagggagggctggttgtatgttcatttgaaggcaaataatgtttgtgtgttgcaaatgtcagtgatttatcctaagggcttaaaatgagtgcagaaaaaccacatgtttcacttcatgcagagaaatatcttcagtggattttgagagaaagtacaggttaagaaaaattttttgagtgtatcggatatctccaacatgaaccaaaaggaaatgaaaatgagcatggtgaggtggaggagagagacttaaagaattcttatgataaaagatataccgaaggctggaagttttctaaatcaaaaatgaaattctaaagaaagggaaaggtgaaatccagagcctttatttcccatggctagagtgacagattatccatttgtgctccatttgtcatgggcgatttaaaatacagcaaagcaaactgcactgaataatagcagctgatgctataataacttgtacacaaacaatttaattttttatctgaaaactctaactaaattaccccaagctcaaggatctttcattattatacatagccaaattaagacaaaaaagtagagagaattctattgttcatccttatagatttgttcacaagctgctttctacatgcaccgagctgggagcttgtcaaatcttcattgatttgagcaacttacagagctgttttaacatccacctccacagattacagggtgattctgaccctcattgacagtgcttgattaaccacagacactgtattctcacagccctgtcatttctttcaagtgtcctagcagtgtgtctgacattggggagctttcccttaattattgttgttgtttttcttttttaaaaattataaaagggggagtggcaaaaaaatgggaaggatctggggatggtggtggtggtgaatgtgtgcacagaaggtttatgagattttaagagctgcaaacagaactcatctgtttaaccccaggctagataaaatgcagtcatctgcacattgtttagaggcacactgcttctgttatggcaaacggatcagaagatgcttgttttctttagtgagagatccagacagggccactttctgttagtgtctattcttaccctggatgtttctgtgtgccttacccattacaaggtacaacttacagctggtttggcatttccctattctgctactggactggtgctacttcctggctttgtggtagagttgattactttatatcaaagctttaggtgtgggctgggtgcagtggctcacgcctgtaatctcagtactttgggatgccgagccaggcagatcacctaaggtcaggagattgagaccagcctggccaacataatgaaacccatctctacaaaaaaaaatacaaaacttagtcaggtgtagtggtgggcacctgtagttccatctactcggtaggctgaggtgggagaatcgcttgaacccaggaggcagaggttgcagtgagctgagatcgcaccattgcactccagcctgggtgacagaatgagactccctctcaaaaaaaaaattaaaaaaaaaaaaagagctctaggtgctctggcttgggactttttctaaggactgtagagcatttagggaggggagggacatatgaatccacaccaagatgtaacagcagccaaccagagttagaccaagatgacagcccgtttaaaagagcacctcacagatttagaaaagcgagtgcagtccatggaaactttatgactccaaataacctgaacatttctatcaccatgcctaggacagacttcagcccagcctgtcctggatatggtggtagaaaaggggagggaactaatgaccccatccttaagagaggcaaactcactgccttgtttaggaaactagtttggttactataataaaggccaacagaaaagggtataaaccagattgaagtgtattttcctctcatgcaccaatgtgaatggaagcaatcctgattgacatggtggctccatggcaacggggacccaggctctcaccttcttgttgctctgcctcccatagcacgtggttttcaccttgtggcctaagatggtttttctgctggccaacaggaaggagagaagggaagaagttcccttctcttctttttaagggcacgtatcacttctgctcccatcccattggccagacctatgcggtggccacaccaaactgcacaggaggctgaggaacatgttctccagccggacggccagcttaggagctgctaacatgtgtctcttcttctctttccaggggaggacccgcagatcctgtagactatctgccagcagcacctcgggggctctacaaggaaagggagcttccctattatccaggggctcatcctatgcaccctcccaaagggagctatccccgccccacagagctcagggtggcagatctccggtatcctcagcactacccacccccgccagctccccagcacaaaggaccctttcgacaagacgttccgccttcccctccccagcaccaaagaatgccagcctatcaggaaacaggcagaccagggccccgtgggggcagcccagaccagtacccttaccgaacccaggattcccggcagaagaaccccatgactgcagccgtatagctgagtgccaccgaggccagcccggtccagaaaggaaggtgtctactctacctttgccctttctaaacctgaagacctccttggtgttaggaattctccatgttactgataagctttttctcactgacattgtaacgcatgactgctaatcagagagaaaaagaaggggaagggaattggggaggaaaaaaaatcagaaggaagacgaaagatggggctataaaaacaaaactacctgatagttgaaacgctttcagagttgttcaaatcagtgagagtggcaacggaacacacaaacaactaattatggaactctactctggggatcctctctggctagataacctgtgctgatgtgcagacacgtggacatccccctctgagactggcggtccagaggcagtctctgccaggcagcattacccgctccgaggtggagcctcagcccccttcttagagctgttaagtctaaggtgtggcagagcagacagagatagaggcatctgaagtgagtataggttttttgactaagaaaaaaaacaacagcaaacatgactagtgatcttgaaatattttgtaccgagagaaagactgcatttatttgtagaatttatcaggtttctgataccactcattggatgtaaacatttcatgtttcctcacttttgatatgaaagtcggtaaaatgcagtattagtcccgggaggatgtgcacagctggtcagagcttccagaaggaatatcttccgaggactaaggtgatcaggttaagagggttcaacatcccacggccctcaccttcctccctcccacattccaggcatggagatatctggtttcagagtcagccccaaatctcctgcctataattactttaactggggtctctaaggttcccacttgagggctaaaatgtagttgggaaagagggcctactggggaggtctcacaggaggcagtgccctgggaaatgccaagtccagactcagtgccaagcagtaaccatctgcactcggggacagcgaggagctgaccatggcctctgatgaccagcaggtattagatggaagtgaatgagagagagagagagagagagtatgtgtgtgtgtgtgtatgtgtgtgttcgaacacatatgattgccagtatggagaatgaaagattaataatgctttctggagagtttgatgcaaaagtgggggaaacggagaaaaggcgctaaggctaaatccatctgcatttgctatatttcattagctaaagtcaggtcagggcagggccaaggcctccaattggcaaaggacagtgttatggctttaaaaagctgaaaccccaacctctaagtagatcacaatgttttctgagctttgcagtaattttctatggaaactaaaacctctaaaacatacaagctggcccaaatgagaacacaagcaaaagatgtggaagacagcaaaacctgagcactggtttgaaccaggcactgacatttgaaatgctttaagccttttcacattccttctttattccctccaaaaaaaaaagtcttgagtttaatttaggtctattttggctgagattagcatacctctgactcacaggatttaataaattatagtattattgaatacataggacatccctctaccccagcttactcttatctttttaatttaaaatagtattctgctaccaagaaggatgcaactgctagttttagatgtaaatagtgttatttactggactttgtgatattattttcttaactacactttactatggccctgttgaaaacagactatcaagttttttgtctctgttctgtcatctctcttaagccaggcacctttagagtgtttgcaatttgttcgaagtggttgaggatctcaggccctgctcacgtgaggtggagtgcaggggagctaccggtttccctgctgacctgctgaatgctaccttcccctcgagttgaatacaccttaaggaaaatgataacacgagggacgtgtaacttgttttgaagcattaaaaaccagcagctcttcactatgttccatattttaaccaaactactgtagactactaaacatagccaagccagaacattccttctggattaagcctaggccacttgaggggcagccaggggtgatggtgtcaggtgagaatcctgtgtcttgaaggagtggcctttacaggaagagtgcccatgttttcacctgcagcgttgccaccagagtgtgcaatacctcctgcacacaggctcagggtaaactgctccaaagctgggttttgtgttgcatacaaagtcaataaaatagttgctaatcctgaatggcagccagtgatgtgaaggtactattaaagtgaacaaaaactagattgcaacagttttctttccttgcttgaagtataacacacgctccatttgatcctgcctgaaagaagctaacattatatttgtgacagacagaggctccatcaagccaagcaacaattaacagctcaagtgtaagatttataaatgcccgtgtactcacccttcaattgttaccacccagaggttacaggactctttcccagcatttaggggaacaggcttttagagtatttagaagaccaggctataatcagtaatgtgcctgggagcaggaaatagctcccaatttatttatggccttgggaaaactcaatccggtgtctccttgtagctcagaacactaatagcccccctggaagagagtggcacattgagctccaaacccaatcaacatacatccacttggctgcagatctgactgctgggtcatgaaggccgtgaaatgatgtttgccctcaagtcactagatattttaagaagccctatttttctccctttttgcaggagtagagagatgaaagaggacagaccattgaaaacttttagatgcaggagaattgagacttccacaagggagagaaacacagcctccccagaatccattatgccatcgggttgtggcactctcacccttgccataataccgtttcctaacaatatcaaatcagtggatgaaatacaagctcagaaacaggaacattttcctaaatcataacctaatagcaaacaaaaattgaaaaaacaattattctgaagctcattattcttagatctgtagatatatatgtgttgactcccacaggatggcaccaagtaaagatcttaagagcatagtaggggttctgagaccgactgtcacccgtggatcctgatggggaagaacagaggcttcactgtagctatagttttccaccaagtcaatcaaattaaaacatgactcattgtcccctccaaagattcataaaattcttgagctaaagtgatcttctgaagaaaagccacctaacaatgttaggaggctcataaagctcatttctcttttccctggtatgcacaaatatcaagcctataaaaaagtaattatttccccaaacctgtaaccactgcattcgttttctttggaggaacattgtagcatttcaggagggtcgagagatctaaagagtttggtctgaatgtgtgtctgtacaattccctttggcattaaactctgaaacctacaatcaatggccttcaaattggtgttaaattgggagaacaccctactgctttctgagtctacgagcaacagaaagactggtcttagtgcaattaggcaggagggatttggactcagaaacagccacagaagtatttctcagcactcccagttcctgccaacttagctggaaacgatgccacagcgagaccagaaagaggagtcgccttaaggtatccctacaaagtcacctttctgataaaaaggagggaaaaaaaagttagatatctaaaataagcctagaatctcacacacagctgtgacttctaagtgaaactcttttctccctcatgtccttaaatagtcacagaatcacacacagcctgacttttaaagacaagcttggctacaggaaatgaaccaaccccaaagactcttctaacctgtctcctgactgggctccttcagaaagtgttctcctgttccatctgtagggctgcttactactggaacctaaaacaaaacctgttgtttgtaccatcactttttctggtgtttcctgtgcttttgtgattccaagtctgttcataagttctgaagataaattatgtgaaatcatattttggcatatgggggtggaggatgaattctttacagactttttaagatgatccatttgtaccacagaaaacattttggaagttgttatatatgagtatataaatttttcttttcatattttacattaaaataaagctttattcagtcattaagacgtcagagtcttggattgctttaggatggggttgtccaatcttttggcttccctgggccaccttggaagaattttcttgggccacacataaaatacactaacaccaatgacagctgatgagctaaaaaaaaaaaaaaaaaaaagctgcaaaaaatccctcaatgttttaagaaagtttatgaatttgttttgggtaacattcaaagccaacctgggctgtgggttggacaagcttgtttcaggatcggatctgatgaatcaacaagtgggtctgggcctactcaccctggaatagcaacattcagtagttgaatagcaacgttccaaacagcaagagggcaaggaacaagagcatcagtcacacgctgggccccccaagaaacagatgctgagatggagattctcaagccaatgtgtactgaggtgtgcacttgggtttcaataccttaaaaagggagggaaacaggcctgggcagagggagaagctgagccgtagtgcactcccagcttaggcctcagccaccccacagtgggagcaacaatggctcttcagagctgtccccagttgggacaagggagctgagcctttatgccaccattgattggtaaatacaggttacctctggaaagaaagatctagctagggttcggcagttttcttcagttgaggcaaacccaaagaaagccgacagctggggcccatctttggatggtattcaaaacagctggaaaagagctccttcttaatgtggcatctgagcagcctgtcacagcattcaggacaacatctaaaactggcaaccactttctggtgctggaatcactcatccctagaaagttctccttgagaccgtccctgtcaacccccagctcctttattcccttggcctagtctcagacctccccatactcctggtaagcccatccacagccaaggtttcggccaccgcctctctactgactgctccagctcagctctgtgccctgagctcatgcatttctgcttttccactacccattcccatttggatgtcctgcaaagcctttaaacataacatgcccacactgaaaacaagctttctccaaagaaacctcctcctcacaattctgtcctggccaaaatgtgaaccaagttcacagctaaaaactggaaacttggaaattatcctggatttcccatttaaaattctgccccttcctcctacacattcccatataatgagatggaaggccaacattgtgtcctgcaattccatcaaatatgtttatgtttcctgataccgtgacatgcctgggctcagcctcatcacttctcacccagccccttcaatagccttcgatgtgatcgccccccacctcaggccttgttcccttcaatccacctctgtgctatacagccctgctccttgcttctggaaataaagttatattggaacacatacacacccattcatttacatgacgctctagagctctttcacaacagcatcgatccctg

SEQ ID NO: 429 - DNA, 15827 bp, Homo sapiens
  source 1..15827: mol_type = genomic DNA
ggccctacagcggaggcaaaggggtcggggcctccgcagccatggctccccagggtgggctgatagggtccatgtgctcctcagccactgtcaccgcgctggcgccatactcaactctgggtggctaaggagagctagacccttggggtgggcaggagggaggggaagagggttctctcctccaggggagcgctgggagtctcagaaacctcggctgttcctactctctcccctatgccctcttcctggtctagcacattcagcccaatgcctttggtgcttactgggctcaacctcagagctctcagatcctgaccccctcaaatcagttcatgttcaaaaccacgagtttcctcctcttggccctcaccgcatggctcccggacacagttagctgcacaggttggggagttcagaactgctttggtgcagggtagaaacagagaaattgttgatgttcaatctcaggggtgaataattcagggctgcgcaaaacctcatttaaatgaaggagaaatgaccattctgtggtttaacagagacttcctgaagctgcaggtgctgggagaaagacgaggccaggccacctgggatagagtggtgcgagattccaccgccagggagaaaggaacttgtccttcagacctagagctggagctatgcatttggcctcccgccggtcgcgcttggggacaggagggcgccggatctatgcgccccttagcagcagatcgggatccttttgcctcctgccccttctgtcactgcttggagagggatgagttctggtggctgggcctggctgtaggagacaggatttggaccgtgcccctctcgcatcaccgaaatcacccccactattccaagagtggttggctattaaacgtgaagatttcctgagagaaggattgaggacctggccaggaatgggacacaagttccgccttgtgtcttcctgacaggagccctgcaccgcgctggacgctcaccttgacactcccagccagctggggtactgatcccacccttccccggccgctgccccgggagtggggaggtagagagagccacacccgaaacacctttccacgataaacttttattctctatcttattattaatggtggcggaaataaaactaaaaccaaaacgaaaacgagtactagtactaacacactaatcaatttgagatgacttccccctcattcccaaagctagaggaggaagggggctgaaaggggctcagagcagtggaaggtcccaggcccagctggggttgggacgtgtgtgtgtgtgtgtgtgtgtgtgtgtgtgtgtgtgtgtgtgtagaggggtgggttccgggggggtggtggaagagggccgaggggggaggatagaaggagggggtagagtttcagggcggggaggggggcgctggggcgcagtgacgggaaccaatgagctgccaactcgcgcgtctccggcgtgactgccgagattgacgtggaggacacgtcaaattgattcccgcacgctgcagcctcccggtcagacgaatttctcccaatcggatgaagttcaccctgggcctggggtcgcgggcgtggagagtgtcctgggagggggcagcagcggcggcggcaggccctggagcgggcggcagcgcgctccgctgccgcgcacagcgcgtctccagcccgcggctgggccgccgcggctctcggctctcgggcgccctccctctatgcctctcacgcggcggcggcggcgcccaagctctcccggactgcgccgggcccagccccggccaccccggccaccccggcgccaggcagctggccggcccgctcgctatgggtaaggggcgggcgacaggcagggctcgggagggctgatgaggtgggtcgggtccgcctgcctcccttccctctcgtccgctttccctgggcgacccagtcctgggtcctggagaagctgcattctcctctgatccccagccttcagggggcagttgagcaagtctgggaagggagtgttccaagtagacgcgctaaaagtcgcgaaagggcacggagggctacaatgcgccgcgctccactccgcggctcctctgcgcccttgcccactccaagccagacccaggcggtttgcccttggactccgagctgtctggggacccacaggtcacctttggaagtgcgcctgggtgcagtccctcgctccgcgtggggacccttggctaacccgccgggtgttttctccccctccggctcactcttgtctggcgcatccgcagagcagacgtatggcgaggtgaaccagctgggcggtgtgttcgtcaacggccgccccctgcccaacgccatccgcttgcgcattgtggagctggcgcagctgggcatccgaccctgtgacatcagtcggcagctccgcgtatcccacggctgcgtgagcaagatcctggcgcgctacaacgagaccggctccattctgcccggggccatcggggggagcaagccccgcgtcaccactcccaacgtggtcaagcacatccgggactacaagcaaggagaccctggcatctttgcctgggagatccgcgaccggctgctggccgacggcgtctgtgacaagtacaatgtgccttcggtgagctccatcagccgcatcctgcgcaacaagatcggcagcctggcgcagcccggaccgtacgaggcaagtaagcagccgccgtcgcagcctacgctgccctacaaccacatctaccagtacccctaccccagtcccgtgtcgcccacgggcgccaagatgggcagccaccccggggtcccgggcacggcgggccacgtcagcatcccgcgctcatggccctcggcacactcggtcagcaacatcctgggcatccggacgtttatggagcaaacaggtcagttgtggcggcctccgtagccttctattaaggggcagaacctggggcgggcaggcttgcaggagaggactcacactcgctctcctcccgggaccggttctggctcaggggagggctccacactggccagggaggctgggggtcctgggccttttgtaagagacctcggacatcttgaactttttatgacaaatatggaaaatatttcccaaatagaagagcaatcgccgaccacaaatttggaggcctgaaattgtgctttttcattcttgcaaaaagtatgcaagcccctgttgccaaatctaagggggaaaaaaacccgctcaattttgagaccctttctttagctctcagaatccttcacgatttcccaagggttctgtcccccactcccaggcccagtggctcttctgagttaaaggaaaagggatcttgtggtcgattgagtggcctacatctctaaggtcctgtggccttgcaggtcctggagtttgcggtgatggctggtggggctgcagccaccttcacaaggatttgtcatttatctgcaactaaagcttaacacactataggtcaagtgggtgacgaggaagatggggaaggcgggaggtttggaacaactttgatgcctggctgggaaagaaaccagccagaatcgggtctggatttctttgcgctctccccagctgccagcagctggccaggggatggcacactcttaggtgatcagactcaggaggagggcaagaagcaaaattcaccatagcctaggaggaaagagtggtggctggaaagaaactgtgagtgctcagctccagcagcagcagcgcctctgtggccctgctctggctttgtgtctcctggtggctctaacccagcctaaggctaaagcttcccatggaatggcaggggtctggaggtgaccccaccaagcctgcacgcagatctggaggtttcccttggttcctggcacacacaagggcccggggagcagctgtgtgcttctatctgacccgtggggacaacaatgttgacgcttcttttgggaaaccctgggcgtttccagaggcagttctcgtagaatcgtctccctgccctccagaggcttgtgcagatgttgagaaatcaatacaattttcatgaggttgctgtagctttgaactcggaagtttctgggagccgtgtctggacaatggagcggccgctttggccgagtctgcccaggctttgactcagcagcagcctcccgttcgtgggaaaccggttgaaggctaggaggaccgggcagcaggcctggctgcctttcctccgccccacccggagtggtgaacattccagtccctgccgcctcctggtggagtgtcaggccacctacaaattttgtgggacccctggccgtgtcttcagatacaaattgggtggttggccacacgtgtgcccagggcagattcggaggcaccttttaatccgtcctctctctcctgcaggggccctggctgggagcgaaggcaccgcttactctcccaagatggaagactgggccggcgtgaaccgcacggccttccccgccacccccgcagtgaatgggctagagaaacctgccttagaggcagacattaaatacactcaggtaaccaggaggcacgtgaggccgtgaccttaagtagggaagcagaaggtttgggcaagtggggaaaaagagagagaaagaaaagaaaaaatttccaggcagagagatggttgtatctggcagccggctagcaagcgtcctttctgtcctttcctcaagcgtactagtttgggagagtctgactttagaggggttgacttgcctttgccaagatagcttagctaaaaaaagctggaactccagatgacgaatccacagtcaagggccttctttctctaaatcccgatatgaataccatgaccccttcacatcgttatttgtaacagtttgagtgaattcttagaaatcactttgccaaagagtcctgactaggaaatttagaggccaggcctcgcatggggataatggatgggcacaggacgtgggggagcgataatggacgaaaacccccgtctcagtgatggcgtgggctagagaaggcaggattttctgctgctgacggtccctctctatccccacagtcggcctccaccctctctgccgtgggcggctttctccccgcctgcgcctacccggcctccaaccagcacggcgtgtacagcgccccgggcggcggctacctcgccccgggcccgccgtggccgcctgcgcaaggtcctcctctggcgccccccggggccggcgtagctgtgcatggcggggaactcgcggcagcaatgaccttcaagcatcccagccgagaaggtgaggagcgcagggagtggggcgggtggatgctggaagggttaggaagggtactggggagcgggtgtgagcctgggaaaagggagagcgggtggggaagaggtgggtcctgggcatgaacccttcttctgggttaacctttgagcatgtagcttcttggagcagattagttctgacaggtgtccctataaaggtacccgaggttgagagagactggccccaagactgtcccctccacttatgatgggagaggtgaaaggaggtccttctggcacacaggacgcgtgggtttggatccggttctggcaccttcgaccaagttcctgcttctttctgggtttctgtttctccatccagagacacgtctagcaggcaccctccaggctcacctttctgtagacctgttctggcacctaagccctttaggtggggttggacttgctagtggcacctaacctccatccccagacccttcccgtctctgccccactgcccatctgttttttccaggttccttagagagaaaaaaaggcgtttggattctttttcttaaatacacactgtgggaaagtagaggccatgtgaatcagtgtcctttactccaggctcaggagctttctgtggttgtgggtggtggtggtggtgggcgggtgggggggttctctctttctgtggaaaatgtgcctgggagtcttgcctccttttccgcttcctccttctcttccttttccataagtccacttcctgaaaagtcgaggaacagattttaggtatttcactgacagtcagcagtgtgagggggatcttctcacacaaccaggagggttccagtttttcctttaacttgggaaaagctcaccagcccttgagtcctcattttctttgttgttaaaaggaatggcttgatttgctaagttcaaacttgccagtgcttaggttctgagcaccagaaatttgcaacttcaaccaacctgggaaaggaaagggtcaccccaggtcgtcccagccccagcagagaaagagacaaggcacaaacctgggggacagcgtggagttcccagattataaaaggatttttactagctgctttgcctccacctgtccagggctggaagcgaggtggatgtagtggcaggtggcagtgggcaggcaggggacaggagggccatcctccttggtgctgcccaggcaaaaagtgctatttccaagtagtcttgataagataggagggcatgccctggggagtgggggtggggtggggggcaggaaggaaataaagatgccatccacaacagtgaaatgaagggagaaaaatactttttctatttctacctttcctagagcacagacatcctgggatattaggataatgttcacttgcctagttacagacaaatccaaataaggaaaatttataaaaattgggatttagagctcttttaaactttaagtttaatttaaataggatactatcatttactcatttatagaaaaatccaagtgaaggaaatgttaaaagttgagagtaagaactcctttaagctttatgtttaaggatagttaaggggtcgcagatgagcgcttcactcatcctcagcctccaatcaacctgttttctcaacaactgaggttatctgtcgaaatcgaaatcaaaataaaatttaccacattacacaaatcacttaaataagcaggttcttttgaattaaaaatgtataaccacagatttgaaatatttcactgggttcatcttaaggagaaggaagacttagaaaaaagacccacagtcttcagaggaatgcatttgttttcaatagagccactttgccctggaggcattttaagctctacattagacacaaattataaagtgcagataataagccaaaggtaacacacacagttcctaattctaaactacctgtcttaatttgtggtggaagttgcggggaagctgattttaacattaagcctcactggtgattgattttctttagaagacactttccttttcagaaatacagggtcattgaatggtgctggcataagtcccttttaccattatatcagtttcctattatgtaatatcccacctgtttttaaaagctacagcaataatttgttactctagttattaaattaataatttaattttgtggtcctccaacttctttaaaggttctaataaaagataatcagataacttggggacaccattagcaatgatttctcaagctggcatgcaactgtttgtgttcgaacaggaatgtagaaataatcattcattatctatctatattcatagcctgagaattacatacatgcttgggttatggatttttactccttactggtagaacagctgacttcaaagatctattccctcaacacaactggtctttggaaagacagaaaaataataagaatcactgccttttattttctgatcagttcttaagaaattaatatcttcaaagaaacctgtcccagaggacaatttactatcagcaattgttcaattcataagaatagtgagaatagtatttagtgaactccttttcagtaagaaaaaattcttctgtgtaatgaaaagcaatttaatacaataaatgctcagtaaaagcaaatacctttgatcacctaacacatacacaccacacacgcacagtgcaatatatatcaatatgtcctccaaattagtgcaaatgaacagcttaacagttaccctaagtgaaacttaatcaaatgtcaaatcgaaaatttagcatttaattagatattaattgattaattgtgttatttaatactataattcatttttttcttattttttaaaaaggtagtgagtctgggtttcctattatgtaggtaaaaagcatgatttacatttcccatcccctgaaaggaaactttaatttttgggaattgagaagaatagaaaaagtttcgcttaatcttcacttggagaggctgacattctaggaatctccacccacatccaaatgtcttttcatagccagggcacgaccatctccccttccccacccttaggtgacagacaccaccagatgctccctcaagacagctggtatttacaggatgttttcagagaccctcgaaacctcagggttttaagtccctcctcgtggggctctggaatgactaaagatttggaaatcaaatctataagatactgcatacgcacaaagaaaatgtattgcttttatttgttaaagataacttgcagcttcgctccagttacctctgcctcgggattggttcttggaagatcctaaaagtaaactttgtcaaagagcactaggtcgctggcattgtcgcacccggacgctggcaaccccggcctccgtttgacccagccccggggatcccttcccagacccgtgcctcccctcagcggtggtctcagagtgccctgcaattgcagttgaatatttaaaaaatgcctctccccattcttagcccctgaattaaatgagcctgacctaggccccggcctccgagggcccagaagtacccacccttgttgtcctatggagggaatggagggcaggaggggccctatgaggaaggatggcttggacagggctaaaaacacagcaggattcgcccctgtagggtgggatgcagtcttcctgggtgtttatttttcatgagttcagtttcttgcttgtctctaaggtaaccgtcccttggctgagaaacctccacctcctcagatgttttctaaacaggtcctcactttgaagtgtgtgtccacggtagaaagaaaaggtctgaatacttgttggctgggcggccacaactttgtttaggaaaaagagctgagagccagggaaaagcagaggggccgctctgtcctgggaaggtctttagacctctttaaaacctcaacgaaaccgtgtgttttcttttttttttgtgtgtgtgtgtgtgtgtgtgtgtgtgtcttgcacagaggtggttggcccagctctgcgcagccacagcaagttgcgcctgaggctgaggcgagggaagctgcaggagaaaaaaaaatccagagttccccttacttcaaatcgaggcgctccaagctccccctttaaaggaggacttggggaaaaaagaaaattgaaaataggcccctgtaggtataaacaaactgtggatcctagtgtaggagaagcagagtggctcaaggttgggaaaggaaaaacaggcttgcgcaatcgtggcgtcactttctggcttccggtggcaaaacttgggccccttcccaagcccctaaataatagagtaaggcgcagaatactgcccgatctggcaatcccactgtcacttaatccggaggcccacaggtcccaggacgtgctgtgcccacagtggtgagcgcatctggatccccggacctcgtgggcacaacgtagtctgccgctcacttaaagcgcaactgcctcctacgtcggaggaatccaggccgctccagggaaatctctggtggctcatttcccgcaagatttccccctgcccacagcgagctccgagccgcgggtgtcagcggactcgacgcattggctgctcttcgcacttgtgcgggcgcctggggtttggaaagggtgagggtccgcgcaacgttagagtcctgttcccttctgcggaagtcgccatcagacctgaaaccttcccagccctctgcgcccttcacttcctttactgagcaggtggtgagggggttggacggcaacgggaattgcacctggccagcggtcagtgtttgcaaatggccttgcgaggagtcccgcttgccaaggctctccttgcaagtggctctcctagcgggagaggaagggctggtcgcccacggaagcttggggtctctggagagcgcgagtctctgcttcactcttccagagccttcaagggttgagcgctcacgacctcgctctgcaggcgtcctgagtcccagtgcctctcgcactgcgcggcgctaggtagtgatccgacgcctctgtgcttcctcccgcagtggctgacaggaagcctcccagctccggcagcaaggccccggacgccctcagtagcttacacggactgcccatcccggcctcgacctcctaggggcagctctccccggacccgagcccggagggaacggcaggcggacccgggcgcacaggtctgcgcggcggccccggcaatcggcacgggcaggatcggaggactcgcggaggaggaagccagtgccggcccgcggggtgcacgcccagccagcccccaggcccagccctgcctctggccggacccaccacacttcctttattggtctgggtttttaggcttctctgaacttgggttttagactgccgtaccctcctcacaatccttgctctgacgtggcctccttcgctctgccagcttcaaatttcttttttgtcactcccttgtccgtctccgtctcgcctctctccctgtttccttcccccctctttctttctcactctccctcccttccctttctctttcccttcctccctaccttccaccccggctttccccgaccttccagggctccctctgcccttccactctcttttccttgctccgacctctgctccagtcccgcttcttcccccgtctcctctttctagtcctctatatgctatcagccctttttcctggtccatccctgtcgttccttctctctctgtctctggttctactgtcaagggccctagttccctttgttttactgcttccccaaccctccctcagtccctgagagccctagagccatctcggtgacagtcccttctctggcacctgggactttgtagccttcactcctctgagcccaccagccctaatggaggggggctcaaacctaggaagtggacagaaaagccacagcctttattttgtattttttttgtaataacaaaccctaaaaaaccctccatgaactgtcctctcccgtcgatccccgcagcatattgtctggaaatctgttttctttctcagagcccagtggccgccgggcttctcttcccttctgagatgatgtcaccccaaagaagactggggtaggagtagggagcacaggggttgttggtgttttcagtgcttagaaaactgggttgtcctgcaggtgtctcctcccacccctccactcgcaacacttgctagggaatccgaccagtggtaaacacatcagcactttttggtgttcaggggtcagcacatttgttaatttaaaccacagactgcttccaggtacaaaggttcatttggacttctggtttgcaagggatgagggttaaaaaaaacaaaacaaaacaaacaacaacaacaacaaaaacaacccagaaagtatcttctagagccagccgcaagagctgtgagctgcttccaagttaggcgagctggtggtggtaccctggacataatgcaattctgtagtcagagcaatatccctggcgagagcctgacatcgcctgttaaaggtggctgcctctgaataaaggaaagcgtctgaaaggtgtgtggtgaggtgagcaagtctgtttctgagcgcagagtgttgagttcttactccgtagctaccctctcccctgagttcctaggatgaacactatcaagggaaattatgcagaaaccaccttgaaatgcagttaattctgaaaagagtaaaatgggcaaaaggcaatgagccagaatggaggatttcttcagaacatttctagtattctaaaagctaaagaagacaatcccaggctaccaagtaatctagggggtttgcactacaaaggggcttccggctaattgtttttttttcctgcctctgtttgaccttctaaaactgatggaagagatttttgaattgaagttgctgtttgtgagtggagctgcctgcttggtgtgtgcactggtcccacctaggggactagtggtaaacagtttttgtttcaactctttttgatagtatctgttgaaggtatcaattataaaaaagtacttacttttttcctagagagactcttcttctcagattcaaagtctcttgtctttttttttttttttttttaaagtttcactttgtagacagtgttagtgatggctagggatttgatttattttctttagaccacatagcaaggtatgaattagagggcttgtgcttggaaactgggtgacactatctcatcagagaggcaggattgagacttggactttgagactgaagtcctcagccttccatggcagcatatcctgtagaagagcttgtcatactgataataggaaaaaagtatgacagagaagcatgttcccaagtcccccatcctctcagcctgtctccttgtgcttagatgagcattgcatgctcagtggtgacatcctggacagaattttcatgcacccatttgtgctgcctggagaaggactggcttgctcaggccaggaggaagacatcacatccctttctgaaggaatgagaagaatctatatgacaacttctacctttgagttgtcaccatccccatttccctgctatggcccacttctgtgtttgagctgatcagggttatgggggagaagagctgggaaatgcgccccagggtggatgcaaagcacctgtgttttaagtgccacctgcaaagggaggcatttttcaaatctgcctcttgttccctgtatcctgtggctggaggcgggtctttgagttccctggctctggggcgagcattcactgaggataggcagccttcgtcccagagccagcaggctctgacatttcatgtggggtgtggagggacataccccctctctcgcggctgggggtcacggaacatcttagtgaacttggcttaaatctctgctccactgtatgtgtcaggggactgggacctcttggaacctgtctgtgaaatgtagccttcaatgcagtaacgcgcacggtgacctggcctgtaggaagactgccactggtgtggcctcacctctctggagacaattttgcttatctgttaacaaaagttagaggaatcacttgtaaggttggtgggagacccagaatttaaatattttccaaaagatcccattggaatattgcacttttgctctttgttcgtatggatctgtggaggaactgagagctcataataaaattatgcagcaccacgtcaggtagaataatttgagaaacaatcactccctaaacgcagtttgtctttgcctttcatttttttaatttaagaataagttttttttagaaaaatatagagatgtaacccaaagaaaataaagacataatcagatagccctctgattttttgaaagaatagaaataatatatgcgtatcactaaaaaactcaagcagtacagaaacattaaaatgaaaagtggaagttcttcctgctctcatttttgttcttaaaggtgaatgctgttatagtcttttgtgaatctttccaggaaaaacatgcatgcgggaaaatatgtttctgtctatgtgttatttgaaagtgcacactaatgagttgtgctgtgcacacacagacatgagctgaagatctgctctttgcgtaccaccagcttcagctccaatgtacccactttattctcgtgaatggatgtctattaccgaggatttattaaaaacagggtatttgtaaagagggccagcttcgtgctttaaatgaataaagacaggattttgttgtgttcattattggaggaagtacttgcaatggattgtaataacttccctgccaaaggtagctgttttttggcaagaagtaaggaaaacaaaccaaaggaaaggaggattgaggggcaagaggcatgaagttttgcccttcttgaatatgccccgagttgttctacagatcactgaagggcatttgaaggtgtgaggggaaggcttcctctcctttggagggagtcagtctctctgggccaggaaagagacatggaggcagaggggtgcgggaaaaccttgtgtgaagaaatactggctacaaataaagtttagattttcaatactggcacaagcatttttttaaacctatcccaaattcaatttactaaaatccacgtggaattaacctcctgacgagtgaaccccactcactgacaacagtatttctgccatttgtgtgtttctggtaagaaggatggaatttatttaattgaactgtggtttcggtaaagcacactgtagatttcctggcatcagcttccctagctaggattacattggcctgggtttcttttcaaaagaaactctacctgccccatgtaatgctggatgatatgaatttagaatcttgctagaatgtgcctgaggaactcagttgaaaggactgtgcatccagacaggctatataataagaaacatttgaatcccttcttttaatgggcaagatttatgcacaaagtggtatttggttttcaccttgaccttgctgtctgaaccatagccttactcactgaagaaatgtcctatggttgagatatttctagccaaacgtttgtatctcaaccttaaatttttttttcgttttttttttttttttttttttaacagaacaaggaagaatcacactgtcttctttttcaaggccataaaatgagaaccacacatttagccccagtccaacttgggaattctaaacacttggaacaattatactcagtttagtctagtcctttctttggagttgaaaccagttgaaactcctgctgcactctaaagagctcttgtccaggagatgcagcctgtgattcttgttggaacacacatctgtttctggctggccaaatccaaaagtggaatcccaattgcagttttcatgggtggcagaatttcaacttcattataatgtaaccacctgggttgccttcacttttctttttcttcttaaggatgaaataggcagataagtattcattcagctattaaattacatttccatcctgtaacgtcttatttcctttttctctggtgaaatatattgacttgatggattatctgcagtgtcatttcttatatagacctcacaattttaactttcagagtttcttccagtcatttgcggatgtggttttagctttgtaagattttattttaccccaaacaacaaacagcaaaacaaaaattactagatggttttgatttaacaacaatctcttggatgaaaagtaagcaagatatttaaatgaatggaaagaaattgacttcttaaaaaattgaattggagcctgaaacttgtgaaacataaaaaataaaatgcttctctggcaaacaagttgtaatatgattagcttgaaccgggaagctgaaagtattattctggccaccagggggagcacatattgttccaggagatgaagacaagcatgaagataaataatacaatgtaaaagatttgtcgttttgttaaagtggcgactttcctgttgtgaaggtctacttagaagagaagggctcttgctgttgttgttgttattattattattgttagccagatgctcgcacatgtggt

SEQ ID NO: 430 - DNA, 102109 bp, Homo sapiens
  source 1..102109: mol_type = genomic DNA
caggttctgccacatggttgcatagaagtcaaagccttcttttgccatttctggctatatgtaatgttggcccaactgcttaacagctttggcctcagtccattcatctataagtttgggtgaataacacccaccttacgggacattgtgaggattaaacaagacaataaaagtaaatgtgctgtaaagattaacttcctttcctcttaaattatttttggaaaaattgtcagaagaagagcaacacatttgatcagaaagataagtgtgtgagctaaaaaaaaaaaaataaagcattttacaactttggaaaatgttacccactgcatttcaagtttttgatattgttaaactatgaactcacgtgcattcaatcagctgaccagtcaactttcctgtgatgtggaatgtcccacagcaacaatccccagtatggcagcttctggcctcgtgtgactatcgcacacttgaaatgtggctagtgcaacttaggaactaattttgtcattttatgtacttttgtttctttaaatttaaatagggatacatggctagtagcttctgaattggacagcacccttttagatcttcctgactgtaaggttctctcacaccagtcttgaggaagcagaagagcatgagtttaaacaccttgggcactgagattgtactaggttcaaatcctagctctgccactgagtgattcatgtaagttccttgagcctcagttttctcatctgtacaaaaggaatggtagtgacatcacttgctgcatgtgacatgtggagagtaataaataagttaatacaagtaagagcttcaaaaggtattatgattattccttctaaaataacagtcctcacactttattgaaactatgcatttacttctctgccttctctactaggctacaagcaccgctataacacaagtgccaatcaccatgcctggcacatttggactctcattaaatacattcaggaagaagggaaggagggagggagaggagaaaggatcaggagagggagggaaggagaaggaagaaaggaagaatgaatgaagtacgcagtaatacctttcatgaagaataaagtaggctgctaaaataaaataaataaaatatgagagttttaaataaaaatttccgtggagatgacttagagatgaagatggaaccgggtactccagggaaaacatatctctaagtgacagtaaagggactggataactctgagagaaccaaagaaagatgaaggaagctaaactgaagggtttttctagatgctacactgataaaaacataaacttcaatccttaaaagtgtgttcaaccaagcttcttcaagagaatacaactgtgggttgtgtaaccttatttgtcgacagaatactctcatagaaagggtccaccagaagtgaagttcatgtacattgggctccccattgccaagttttcatttatactacattcaccagttcccccaaaaaagcagtagtgggcaagttttcataactgtttattcattataaatagtaaatatttactgcactttttacatgaaagacatttttacaacacattgttgttggttgaggctgcaacacaaagatagtacttctcttgttccatcaccctctaagaccaatgcatgaactaaattcggtactatgtctagtctcactaactcgctacgtcatagttcttaactctaaaaggaatgtatttgtgcctacctcattcgtggttccaagaatagaaagaaataaataacactgccttccaccttcttgttcctctcaacatctcaaaaagcaaatttattgacattctaaaatgtcaccacacaaacgtatgtaaacctcagttcctataatcttttaatattggatatcattgtataatttaaaagtacatgagagccatgtgaacacttctgttcttgccctgcctttcatagaaaagagaagaatgtaaacgtaatcagtttaaaagcataattatctgatctggtctctaatcaaaggagcaacccgggtgttggttgtccagcaaatggcaaacatcactgcactctatcactatgaattatgggctgtgaaaataaaagcacctgcaaaaatatacttctgattttgcttatatcgccttgggcattgccaaagcatccatgaggtacacagtattgcacactgataagcagatatgtgaatgcatgtcactttctctccaccgtgcccttcctccaacccaggtgggctaccaaataaatgtgaactggaaaaacgtcacacacctctccccacacaggaaagggaaacaagtccttcttcctggtagcccatatcctgttagcaagacatgtccgggccatttattgacaactagattacaaatgaggatacagtaacaaataatttatttaggaggtcctttacagctagtctagcttcctaaaaatggttgcatttatctttatttcaatttccagtgtgtaagagtcaaggattcctccattcttgcttcatgaaatgagcagttttaaagttgtagaagtatcagcatcgaacatcgacatgttatactttagggtattctattatattttagaacagtctgcttgcccaaaccagtctgggtaaatctcaatacacacacacacacacacacgcacgcacgcacacaagcaaatggaatgttctagctcctcgatgatcagcactaaagaattgggatgttttgatatgtaaccatgtgaaaccattgccttaaaatgttgcatttgtcttttattgctccaggtcttcctcttctccactgcttttgtcgaacgtgttcaaaaggatttgaaaccaactattggaggaagaaaatcaatcactctcctttgtctcctattgggaccactgccccaccccccccaacaaaagggtaatttttttttgttttcagagcagattcttcatatctaggctgcgaagaccagaaacagggccagttttagctccaagtggacagttcacttacgcgatatctggcttgagataatgaaaggcacctgtaaggaaacacacgcagctttttaggtcatgctgggacaattcacagtcaggggcaagatcagctacaggctgacaatgtcatatttaataccgtgctatcaaaggcttgagactaatatttttattcctgagacaagtttgacacaactttgtgtccctgggattatcccccatatgatcctggagctgacctcattaagaacatgtgtttctaatgtcagggattatttcattttggccaacccttgtgttttacctagtggcaatcaggtttcacgtctcaacaattaataaccgcaagatgttgttgacatcagttaagaaaataattacacaaggaagcccctgctggaacagtcagctggctttgcaaaaaaaaaaaaaaattgataccggcatgtgtggcttaatcttgcctctaattcacctttcttaaggaagagttgagtttatctcccttccaggagaaattgccccctaaaaagtccaaggcttactttgtccatactgcccatattggtagcctgtgacagggtccatactgtagcctgtggtgctataggtgggtggacagtaggactgagatgttggcagactgtccaagctcttcatatggtctagtctctgactgcagctggccgacaccgtggtggtaggttccagacccccggtgagaggggagagcgcgtaatcagtctggggctgatgaggtaccccaccgtggttggtcaggagtcccattacctaaaaaaacagccagattgggaagaggttaaaatgcagagagatccagattgcagcctacagctgaaagaataacttgacagtccagtttttatttctttggaaattggttaaagagctgtccaggagactatgaacccaattctaagtggcagagatattacatcatgcccgacgataacatctgactgcagttgcagaagaaggaaagggggagggagaagaggggagaagagggggaagaggaaaagaaggaaggagaagaggaaagagagagattacaccacgtccctagtgataaaatcagactggaatttcaaagaagggggaaaaaaggatgaaaagagggagaaattgtatctgttcatacagaaaaatgtctattcatacattatatctggaagtttcacatgtgatttttaaacagtcatttgcttatatttttaaaagataaatgaatccaaatcaagttatttttcatgtactttgagatctctgtgcctttttttttttaaatagtgttccctctcaagaaagcccctttccttatcttggccattctttgataattagaaatatttactcctttcctgatggtctctggtactttatttacccctcccactgtatattcattagttcagtcacctgctttgactggtgagagctttgagaggagcaatctattcatctttatatcccagcacctaaagcagtgaatgcttgacacatattaagtgccgaatgaatgaaatgtaaatgattctccaagtaaaagcctccattacctattattttatttcttctctaaacaaccatttcatatatatatatatatatatatatatatatatatatatatatatgaagtgttaaaaggaaagacaagcctgaaatgcaaacatggtcttaaaaagttcagtttgtaaataacctggacagtaagacaacttggaaaaaaaaaaatatcctgtgacagaataactttcagatcaacatggtgaagtgcttcaccaactcaagatccctgacccttacagcaccttgtggtgaaagtaagtggataattaattttgcagctggaaaactgccacacgagagaggaagcgatttttctaaactatgtacccttctgtggcagggttcaaaagcaattgcaaaagaaatctaacgccaggtcaagagcccccccgaagacacatctacttacaaagtatttaaatgcagtatccaacaattccacaacatttccataacagtcctgtcttattttaggaagtgtgaagcctacagagattaaagtgtgcaaataagagaaagaggagagggcagaaatgacaaccaagccctgactataagccctcatgctaactgcagaataactctcataattcaggcaatagaacctcggatctaggagttccagtaaggcaggaatctgagaggcaggtgaggcggggggcgggtctagttttgcttcccagaaagcatctcaactcagattccaaaaacaaggatcccataattccctttgggaagggtttgcataatccttatgattaagtaaaatcttcttgaactaaagctctgagctgatccatcttcagctgaccccaaaagacagagaaaaagagatccaccttctgtggattatcaattatccactcttcctccattttaacagaaaatttgaacggatgtccctgccttccccagaaatcctgtttttcattttgttgtctctctttcatttgagttattgtctatgcacacacatgggaaggtgggctggtgtgggcaaagcaacacagcaaagcccacattttgaaagacatcccaggaatctaagattttttgagatatgtggtaaaacatccttttttacaatttttaaaaattagttatatttttaaaaaaaacacacaaaacatcatttgtggcagagcccaattttgttttattggggatttggagaaagtgaaagtcacaaaataaagtaagcatcaataggattgacaattccaggaagatggaaaatcactagaatgtgggttcttttagggccctacccagcattgtttatagcaatttcttcatttcactacttaaaagaacttgaacataactaagaatgcatttaaattagttcctggatatgttttccatctatatgggttctttttgcctttatttgagcttatatagatgatttctatataagtgtatacttggaaaattcatgaacttcaattgatacactagtttattatttatgaaatttcagcccaaattagacatttcttttagaagaaaagagtctttaagttagaggttgtttggtgccaaacacactcctttcaaatcaggagtacattttcgtgtgtgatcctgatgggtgagattggacatgaacataaaaacactttaaaatgtgatttttttaataaaagggaataatcgcacagggcaaatattttaccatgaataagttgtgttaagcaaaattcgaaatcttagaaaaagcaattttgtaactatatcagtccagagaggaaagatatccagtggcactaaataaaaggaaaataaactctaaattaatattgtccttcatgaagatacttacttgaaattcagtcaatggtatgtcactttaagggagaaatggaatgctgtatgtacagttatacttgatgagctcagagcagaattttattcaaaacatgcacactttcccatgagctatatgtacatttttgtgataaactttttaaaaaaatcccctgccatacattttttgtttgcataactttgaaggcagcaataactaattataggggatgggggaactcaagaaggacctagaagagaagaaacatgtccttcctataagcaaaaatcagcttatgatgttgttcatgaagcaacttttggcagtcgctgcgttagaaaattcattaggaaaggatttaactcttaagaccttgaagtatatctattgaagggtggagaagataccctgtttgcagagccgtattagggcaatagaaagatagttcctcaaaggttccagggctgagtagctttaagacttcccaaaacatgaccaaataggaaggacacctgcagggtcttcctgtgtgtcactattgtcacacacagaaagctagtgagggcatctcctttagccacagcactcagcacagcagcccaatacttgcaggggctgatgtgagagcatagaggggaccagagaccagttatcttttgttcctctgacttccctgatagagcccccaagacagacattcacaagttcttatttccactgtgatggtcacatattataatcgtaatctcaagaatcttaaaaggatggggaatacagcactaacattttcctacatttggcctgaaactgcgattaataaataattataatgtgatttatttcaatatttcacactgagaaaacttgagaaatatacaccattttaaaaacctactgttttacagtttttaaaaatgtgtgttggtggggggagtgaggacatcaatagaaaatgcattactctcccctcacataatttaaaacctcaaatctctgtagaagggttccattacactttcatgtatgtttctttaaaagctattttgcgtttcatgtggttcaagggaagctatggaaatttctttctgtgcacaaagaagttggtaaatgaacttctttgaacttatccaatatggttatggaatgtcttccagtcacattttctttttaagaataatgtcagaatttcttttatgcacgcttttcctacaaattccttcaaatttgtaattcaaagcctaaaatcaaatcttcatttgttgtaaagtggatttttttgccctccccttacaccattagtaagatatttctactacagggctggcattttgtaccaattttttttttttaatttggggtatgagagaagcttgattgcctagttttgacaaacaatttcaaagaaaaagaaacaaattcaaggctacccagttctgtctcctgaacactgatcacactcattaaatgccaggtaaatccaggagatgcaatgaccagaaagagtttttctttaataaagatctctgctctgtctcattagaaaaggaagcaaggagaactctttctttttacttttagttgtgaaccatctaaaaaaaaaaaatctgttgagcagatttctaaattgttacctccgaaatgtgttccacatactgtttctaaattgttctttgaacagcctttaaaaacaaattcaaagcttccgaatttatgtccacgtttctcctagcagctcctccatcttttgcattattagagagacattttctgaagatctctttaaactcattctcaagtttcagaattccaaataggttgtttatatcttgattggaagattatatggttcaggaaaaactaagtcttacaattgctccatgccatatttctcttgaattaattttcctattgcaagattaaataaaaaagataaaaactatgggccaaattaagatttacctttaaaatgatatgtctggaaaatatttgtcttggcacaagcattatggttttcccatcagttgaaagtgcctgaagcttatcagaaatctaaaatgattcagtaaattatggtgcacatccaggcgcttcttttttctttagtaggaattcttggttcacgtctttattttctttcttgttcttaagtagtcaggtgttctgatttaacatttaacatacacatttagtttgttctttttaaaaaagaaatgtgaattacagctttgtatgacataaagagtttttttattcttccatcctttcctccaaaaatctactgactatatttttttatttagatataatatattttcggaaccaatcaaaaatgttcaaatgtttatccaaatgttttttgccaatgtgggtgttactggagtcatctaatggttaaatttcagtaactgtatctttgaggttaaaaacctaaatttaaggagcagagactttcctgaaaatgtcctcagattcaaatgccttaggaattatcctgcagttgattagcatctaaataattagattttgggtcctgtctgtttgaaagctgtaagagggaagttgcctgaaggcagaagtttctcttaaggtatgtgtggtgaccttctcacccatcctgagagttagggaaaggccaagactgacctttacctaaccagatagaaaacctgtgcatgttttattttaatccttagcctacattttacaagtagctgtgcttaatgcatgatgaaaaagtatgagtgccagacaagtgtgcttcatatgcagcatacatttccatgttttcattgtaaagagtacagtaagtattgtctcagttaaactctaagggattatgtatgtttcatctccagccctgtgaccaatcacagagatagcttatttttatcaattattttgaatacctattgctcaatagagctaagtgttaagtttcatagcaatattctttacggactgatgactaaaatataaatctagacagagaattagcgcagaaatgagttgcataaccatagatacttgttcttaactaggcagatgttcttctaatttaacatttaatatgcacatttagttgtttttttaaaaaaccattgtgaattatgattttgtatgatataaagggtttttcaggcttctagccttccctctaaagtgtgtatatatgtatatgtatatatatacatatatgtgtgtgtatatatatatatatataacttctagtttacttctagccagtgatgaatgaccatatcacgtccatctattatcagtaaagcccattaagaaaaagttcattccacctaaatgaaaaagcatgccagttaataccactggtatttgactatgttagacccaccatgggcataataaaattctcatatgttttaattcatttacgcatgcctgcatttaatatgctttgtgaccatgtctacaattaatatgatttatgggaaaagaacatgtgcaatattgggggactatagcaaatattttttttttctatgaatgaaaaatataacaaaacagctcaggaaaattgttggcccttagcatattaagagggactgacagagtcctgagtaaacttgggggagttaatgatatcctcttatctgaccctgacacatttgcagcatgtaatttacagaagctctgtccagggaatcttgacaaatgctcctgaggatgtcagggcaatgttccattctaatgtaaaacagatgtgggtcagataccctcattcatcacttaacacacagagcctcaaactctttctgggaggaatgacattacctgctgttaactcttctcatttcaggaaatttctcacaaccactgtagccctctaaagcgcgtgtgctcaaacctatcactgtttcaaaatccagtctgagaacatgactgtggaaaatcaaacgtgtatcttggtttcatttcatgactactctaggatacttttgctaaatattacttgaccctttgagacttgggattctaaatatagaaagagaaaagctctatgtttgggcatctcacaatacttcagtgatatggcattcaaaattttctctctaattgcctgtaaaccgaacttccatgtaaggaaatgcaaggctgattcaccctaataaccattcataaatgcaaatcttagtgacctttaacttcacagtcccatttgagactcacaaatcacttataataaactagaaatactgccttttagtgaaaagagcttcaactctgcctctcccaagcagaggaatgttggtctatatatactatattcccatttccctaaaagttttccctctacctaccactctaacaacatgtagggaagacattctgatctgctaaaggaagaaaatggttgtccagctcaacaaggaaatttcttctttctttcacactatgtatgatgtaagcaaatatttctgtggctgcctaaagtcaatagcataagattgcatctatgaaatgtctgaagactacagaaaagacgcttccttgcccttttcttgtgaaggaaggtacatccttaagataaagaaaagaaccaactgaaaagacctggtgatactgatttacctgtgatactgatgagtaaatgtcaggaaaggtatttctggtaatcatggggaaatggagaacaggcttgcaaaagtctaagaatgaacatactctttagaaaacacttgctggtctgtttcataggctctgtggtaaggcagaataagcattcatttaaaattcatggaatttggccagatgcggtggctcatgcctgtaatctcagcactttgggaggctgaggccagagaatggcttgagcccaggagttcaagactaacctagtcaatacagcaaaactctgtctctacaaaaaaaaaaaaaaaaaaaaaaaaaaaaaaaaaaaaaaaaaaaaaattagctgggcatggtggcatgcacctttagtcccagctactggggggctaaggtaagagaatcacctgagcccaggaagtcaaggctgcaatgagccatgattgcaccgctgtactccagcctgggtggcagagtgactctctgtctcaaaaaaaattaaatttaatcaaattaatggaatttctaccaactctacaaatgtgagacaacatctgagaacacagtctcccaaaagctagaaactactacaccattaagctaaaatcgtatttaccttaattctctcccatacctaactccagggacactgaaccaataaagatgccgtgttctcttttccacctgatgacttgtgcttatggtcataatttgggcagtggttatgtctcctactgcacaggcaacttgatgtaggctggcaacatgcagaacctactttgatcttcagaaactaattctgttcctgcagatcctagcaaaataaaatctttgtaatctagtgattttgaaaaatgctcctcaattgataaactcaaaatcacttagattgtcccttatgttccaaaactttttgatggtacatgatgttttagctacccttatccttggctggtgagagagaagcatcactgcatatcagattcccctgtctttgaggcgagtatcttgcttctaatttacccagtatctattgttatagaagatggactgtatattttcaaaaatacattcattcatgtcaatattatatttcaataagtcaaaactagaatacaaaaagaaaaacaacaggatgaccctctcccctccctgctcctagccccatggaataaagggttgactttagttttcattatagtgggttctcatggtattgtaacctgaatttctcaaataaattgatcttagtacattatatttctggagactatcttatccagccaccttagagttactgcattctaaatggacatcaatatgaatccttagatctttgaaatgtctaagtagaatacttgaaaatactccaatttaccaacataccgcctttcctttgatgtcactcagtttccgtgtttgctttatttttcatggacaagcaaaagtatatttttgtcagagattcacataatttttttttctgagacagaatctcactctgtcacctaggctgagtgcaatggtgcaatcacggctcactgcaacctcaccctcctgggcttaagctgtcctctcacctcagcctcctgagtagttgggagtacaggtgcaggccaccattcccagctaatttttgtatgttttgtagagacgaggtctcactatgttgcctaggttggtctcaaactcctagacacaagcgatcccacctcagcctgccaaagtcctgagattataggtgtgagccaccacacttggccatacatgatatttttaagacaacaataatgaaaccctgttgcaatagcattagtactttatcaaaaatcacttaatgttcctcagcctaagtctacaagacaatttttttagtatcgtctaagttgaacaagaaggtacagaagaagctgagatagtttaaacagtttatgtgaaaatgcacagctagtaagtggctaagtttgaactctattggtgctgtctttagattaatgagttatacccacactgcaatcacttcattagataggaattctttcttttcctttacccccttatctgcctcatcctaaatattattaggtagtttatagcctcttctttaaaattagtctccccctactctaagttcttacacaaagggctgacactgtgttgagacagaagacaccatcagacattaattagaaaaaaaaattcacctgtggaaaaaatcaagaagccattttagaaacaaatggatcaagagttaggtctccacgtgggttttccattattaggtacatcccaggaaatgttccttaaaacttgatagtttggtattcaacaaaagggctccataatcagattagaatacactgaattaaacaaaattaaacatgttttcatacctcaagacttgtcagggcctttagtaggctaatgtgcactcgtacactgaaaggtaaagggatataatttctgacttttaccaaattttaccttcagaatacttttctctcacaccactgttctacagagcctgctttggggaacaagtctttatcatgaggcttggtttggtttcagggtgttcaaatagcatcattcctctagaagcttataatcaaaggcagtgggggtgtggatacactataatagaatagagtctggtatgtgtttcaacaaggtataaatataataatgtggcatcaatagaggctaaaaaagaaattttgcctggaagagtcatggaagggttgacattgagctagaagcatagagtgacacaaatagaggatcatctctacagcaggtattttgaaatctcaggacagatgcaatagtttaactagatttttttaacgcaatctgcccagaatgagacatcagtatttttgtgagaaaaaagaagagttacttctttaagtaatgcttgcttctttcattagttcagtgctaaaggttacccgaacagtcatctcacagctaagaaatattcccttcaatgtagacacgttaccccattattctgcaaaatgtactgtccccaaacgtctcccaatttgccatctgttccattgatcagcagaggtgcaatcgctaatctcagaaactctagtttactgaattcgagctaaatgtcaagagcaatttttaaatattatactatacattgaaaaaatacacctctgatgaaacccagactgttttacagagacagattctttggaaaaacaaacacacacacacacacacacacacacacacacacgaatagtatacaactaatgactaaatcaagtcttctgtgtctgtagtacaaagcacacattcatcccctaattgaataaatatgcaagtattcagatttctgaagatattgccattttgcaaatgcaataataaattaaaagctttacatcgcattccacccacatataaagggttgattcaggccattggccccacataatatctagcacggctatgtattgctgactacaaagaaaaactttttatcctagttgcttagttatagactaagcaataatgctcattttttttcgactcaaaagctggaggaattcaaatgggactaaaaaagaaaacacgaggttgttgcatttgatttgtccaatgtacaggagaacatagctgacagaatttctgtttaaatcaactcggcagacacaaaaataattaattcagcaaggaaggttttcttttggctcatttcagtgacgtgatgtaagattcagtcactgggtgctacattctccctttctttaaaaaggagatttgggccaggtcgttgtctctttcacaattcaccaaattaaactaactcaagaggctatgactggagctgacataaaccagggctctcctcatactcttaagtgtagcgaccacagccttagagaaaaaccaaaagtaccaggtcaattacagcctgctcattgattcaacaaatggattaacagccatgttttcatccatgagcagaacatctcgaaaacctaatatggcagaatggaaacctccaaatggccagtggttattctggtgtagctgaaatgggctcgtttatgatcataaacattcttgagccttcacaaacatcgaggcttctgaagccctggcaatcagcacacaaactgctttagaaaagaaacagaaagaggctcaagcctttgagaggctgccacttttgtaaaaaatctctctctgcccccagctttgtttgacacccaacaaatttctttaatcaaaatcactcctttctcttctacagataaattcctggaaagtgtaaagggaagaaagcccctccattgggaaataggttggtgtcaggctacttgcttgtctgattcttcacaatgataaaggtaggtcaagggcagagaatttgcaaccagtgtgtgaaacgaatgccttatcaacaagactagcatcaggtagcttctggatgcgtacccaaaaacgtcccaaaaaattagctatcttgaaatagaagctggctgtaccgccagggtgaaccttattgctttgacctatatcaacagcacaagagaaaggcaaggaattaccaagccatagtaggaaagattttaacggcaacaaatgaaacagagaagtacccaatgcaacaatttttaatgactatatcccatccacataacaagtccttaccccctggatgagcaaacaaccatcattttgccttggcagctaaagaatttgagattattgttagcactgtggtcccaaaaatgacaagtgaaatcaaaagcagtcttgagttttgtgtacacatattaacacttaaatgcttcttcctaataagtttcaggattaacaaatgtttgtcaaaaggaactgtgctgagcaattgaaatctaatttgaaatggaaccacgatagtctaatacatatatgcatgaaacgaagaagcttcctaataggcgtagctgacaccaaatatgcaatttacatacattacacactaataatctcaattttaatattattctttaaaagcaactggatgggtggtagagttaaaggtttgcttttgtaaaatgtgaataagaacaaaaagtcgatcctggcattttatgccattaaccacagtcttattagtgtaaagagctatctgctctttctgggtctatttcagagatggtatctcatcaacacaagtctgtgatgattcagccgaacttactagatgaatggtggataaacttgatgagatctgcagacctcttctttgttcctgagtgttgctgagtggtgggcaaacattcaggctttttcaagcccagtacacaaatctttatgagaattttttctttcctcagtagattatccatgaaataggacaggtgtactggttattcaattacatcttacccaagacctggacaaaatttgaaacaaggcctcacagcatagttcttaccatggggatttattaataacagttaaaggttctctaaaacaaaactttttttttgtaatttaagcctattttcttattttgtcattggtttcactcataaaccagaaactaaaatctgcccatctgttctaaacataaaatgtgttcataataatccagatttataccaaatgtatttgtaagtattgctgaaatgagaggaactcaaaatttatgggctctgaggttgcaaacagaacttcctcttttcagggaggaaaatgcttaaaatgaatgtaggaaaggctcagaaagcttcttggatatcaaacggcttcatagggaaaaaaatgtcagtgatataagagtaaatgaatcaaaaccatatggatcaaattttccttaaaatacacagtttgaaaaattaaggaggaaaagtgcttggcaaaaatgtgttttaggttttaccaaacccaaaacatttgaagaatcatttgcaatggttgatgaaccctaaatgcagccaagttggcccattttgtatactacaaaacaatagaaaagattcctataaacagtgtaacccactgatactgtatttcactcaggaaatctttagaaactgttaccaaagaactgtggagtttgtagaagtcgggtggggggtgaggcatgaaatgataaaagtttgttaatttaattggtcttgttttgggggtttggctatgtgtgtcttgggggtaggggaacagtcagggtagtatttcttgcaaagaaaagttaattagaagaacatgggccaaatgttaattagcctcacatcttgagcatatggtagtacttcctcggtactccatattccaaggcagcattcctttttcctcctgcatgtgtaggaaggtgctggtaatgtactctctggggatggaggggaaataaatggtctgtattaccccatgcactatattttcctcacatcaacagaacagaaactttcagaaggatggtactacagaagacagcccgtgttgcagtgagttaaatgcttcccttcccagagcgtattttgtcattcattataagccccatctccaaaaaggttatgcagttcaaacagctatccagagatggtggaaaattttgaggtcattagcctgtctccaccctctcacgcatcactgagaatctcgccttaaattccctgacacatgcagcctttgatagaatgaaaagccaagcccaccatttgtgaagccattcaaccatggctgcaagaaaattcagtcgaatatcactggggcagcccttgggaaatttcttaggacattatgcttcctctggtgctgaccagccactaaaatgtgtaatttgtgttcatagaagaactagtaagaactagacaagacatagagttggctcttaaccctgccactagctcactccatcaattaaatgattgtgttgccttggcctcagttttccaataagcaaaatgaaaatattccccagatattgttgctgattccctcagaacaagaaaaacttgccaatgattaaaaaatgcacagaccctttcagcaacttgaggaggaacgacatcagagtttctaaaggttgctgttggtattctgagatttaggctgtcacaaatacagatcagtccattgccaagctctgaccatctggacaggtgtgacctccctgagacactgcttcacaccagcccctcatgaagctgagaccttctctgaggaaaggactgagggcatctatgatgcgccatttggcaaatggctgtaattcccagcctttgctcaagggaaaagatacattagagacacaaaacaaaaaccaactattgtacacatacacaaacacacacacacacacacacagagagagagagagagatgctttggctatccttatagtgtctattaattccttgatgagaaactagaaagcccactctacaatcattcacacatactctagctcacaatttccaagtgtggatggcaaacaatacatcaatttcaatggctctagggaaaaagtcgaataaaatgcagaaatatttttaacatgtcaaatagctccaccagagagatctacagtgaactgatcacagtgactcaaaaaactataaccaattcggtgtaaattgacagatggcagaaggcctatgatgacacgtaaagacagagaaaaggcaagatacaaagttgtatgcactactttctactttctcaattatgtttctaaaggaggcataagaacctaaaaagctagaaggcaatatgcaaagatactcatggtagttgccttgggggttgttttttctactttatagacactttttaagcaaattttttttatttatctacaatgaacatccaatgcttttaatatgaggagaagatagaagattaatggaaattaaacttagcaaaaagagcataaattgacctgaacagaaaagttttaaaaaactagtctctactaaattattttataatatgactaaaacctcctgcatctgtttttttatgaaacctgttttctcttcattcaactctggactataatggacaagatcctagaccaggaaccaggaatcctagattctagtcttaattccctccctatcaatcctttggctggcagaaggtgacaatcattttgggcctcagttggtttttctgcatattagataaccagacagaggtagaggaagtagaagagtaagtagtgaggaaaaggagaaatggtaatcataacgctattagttattctcagcataacactgtccgtgttatatgatccaatatattcataatcactctatgataagcagtgacttataggtcacaagcctttctctagtctcttctttagttaacaagtaaaccagggtgttagacatgaactcgttgcttcacatttttctttaaaatatttttaagaaagccagagaagcaaaagtagtgtaggcacctcttgtttaaacagtgtcattacagagaagtgatatagcccaaagtttacagaaatctaagtttgaatccaattttcctactccactgttgcataaatatgtttggcaagatactgatttgctcattgtcctttgctctttaactttgcctgaggaaataaggaggaatttcatattatttgtctcttttctaactcagtggggttgctacaaaaaccaagagaacataaattcctagtggtggtttgaggtggaaatgtatggcagaaatgcaaaataccctgcatattgcaatgtaataaagaattaccataatatgtaagatatagtaaagaaatacaggaaaaatgcctatggaattttccgttgcttagtattagaatgattttgctctaccatcaactccagaatcatagccaggcttcttgaagtcaaggattaatagttaggagatcacattctagcaattctacttatgtgatacttatataatacaaaagaatacacatcataacatacaagataatacatttatacaagaaagtaccagtttcacttatagaatacaggttcttattagttttattgctattgaataaaataaggtactaagaaatgccaatggaatctgggatctcaccttgcagaagcagctagggcaggagtttacttttattaaaactttcaaccaaatcatgttcatgaaaagcttttctacagcccccaaaactacaaatcttaaaaaatcgcggagataagtacttctgatgttacttctaagttgtggaagaagctcatatgccatgaatctgggtattttaaggatgactctatcaatataagtccatgattttcatgcagaaatcacattcacaaatgccagtacttggaaataaaatgtattaaagtcctgtaggaagcactttcattgttttcatgttgttatttttcagctgaggtttaaagccacctcataattttttttttatcccaggatgtgctataggaatctatgaaacttaattacatttactgttacaaaaaaggatttatgaacttttgcctttaggcggaaatgtttatttcattgcctttgctatccattcttttcaactcctccggctttgaacttttcagctgctcacagttatcactgtcttgcagagcccaggaattccactcccaagacacacaccacaagttgaagaaaacgaagaggcaaagatatacgagtcgttattttggccaccctttgtgccattaaaatctcattttctgcctattagaatgccctcttggtgcttaggcagcggtgatagtcagtgattagtgtgtaattgagtataattgtcttttcacttttcatttgtgtcattctgagcttctctctgtttttctaaccaccaagaggaaaaagggggttgagaacagataaagctgttcaaactctctgaagagattctcgattgcaattatagattgcaaccccttgtgacatttctccaaatttagtgggcagctatccttgccacctgggccaagcactctctaataaaatcaagggatctgtatttaaacaactgctaataatgtcaacctcagacagatgccacatgtaggaaatttaaccaaccctctcacatgcaattatcaaggcaatttattaatgtgatctcctaagaaaagctcatagtccaatgcaaattagaaaaacaattacaacattcaaatatttatatagtcccaaagagcagtaattcccctaatttgtgcatttataactcgtttattccagagttcgtagtcatcagctgggtctctctccacaggacttgtttgcttcctctctgattgttttgtcaaagctttagtgttttcttatgaggtgcttttgattgaaacctcatcaatttaaaaccttatcaattgattgaaaccttatcaattttaaatacaatttaaaacaaaaaaacaaaacaaaaaacctgccactgtttgcaagcttcttaaccaaagcccagaactaggatggagaagacaaaacatggcaaacaccttcacagctaaatatgaacacaaagtctccaagattatatcaaaaatcacttgaattttaagtctaagctacaacttttgatgaagccagtaggaagggtggagagaaaggaaaccagaaaactgaaatcatgtggcttctataaagaatacattatggtttaaatttggcaattcattacactactgcctcagggaattgaatatttggttctggtatacagcaaatcgtctgtctagaaacacgggactgacctgaggtgagaggccattgccaatggtggggttcatggggttggagggccccgacggaggcacaaagctgtctgtatagctggaaaatccatgcctggtgctggggaggcagtaggcagagctgctgtctgggttggaaggaatcgtgctttggtgtacagtgcttggaggaagcggttgaggtctgtgaacggtgctgctgggatctgacacagctgaaatgaaaaagattgtcaaccatcatgttttcttttaggccagcagagaaagttcagtgcaaaagttcatcagccaccaggccatcaggagcatctattgatcaaatcaaatgttcacttcaaactgcgtttcttaacctgcaggtgtagaatcacccataacagatacagtcacacctatctctgcacatacttgtaagtaacatatatactctcacggcaggctcacccagaatactaatgcagaaatcatattagcaatgctaacaagcatattttggtagtgaatgttattcatcaatatgagaattaaccaatataaggactgcaagtctcaaatttcttatcaaatatacttttaaagcacctaaatatttgtgtaataatatagtttcaaatgcctggaatgttctttcataatccaaaataatcggatcttacaatttaacattatcccattcacctctgtgtgctaacaaataatgactttgtcaaagcttaccttccctctattattcctacagttagtaagcatcattgaattccagttagttgcaaactggagtaaaacgtagaggtaaaattttaacaaaagaaaagcaaatcccatggttatttgggaaggttaatttgttttaaaatactgcaattgaattatattacagcacagtttatctagagatattctgatacatcatagaacaaactatgtttctgaaatgtgataggtacgttcaggacaacctgatgtattacaattaacaacatggtgtcagtactgcagaaggattcacttgtataaaatatccaccagagaaatcgcctggaagttactttctaatctccttgactcttcctcggtaccttgtggaatagatgtgggctggtaagaggtctccgacagctggtacgttggcaaggtcggcatggcagtgggagggaaccccccgggaatgagatggttgaaagccatcagttgattggccccagcttgcttcctccatcttgcacggcggttgctaaaccagacctatggatttaatttaaaatttaaggatttcactgatgaaataatagtacattcttaatgaattttttatgctaaaacagattagaggcttcttactgaaagggcaaatagatgcaagagttctctgccttctgtgttgtttgggcgaattgtcaggagtaaaagaagagtttagtgtcaaaggtcagtagaggggcttcagggacccaccatgatcttgcaacaacagcccccatgaaccttatgaggaccatgggcaggaatcactgagcaggagtaggaacaacaggaactcccctccctaccctcaacatccacccacctacgtgtagacagccttctggggaggatacatgagcctctgtgacccctgcatgacgcatgtcctaaatgtggccttgccttttactccaagccttgtattttatattcttattagtctgtctctgtatttctgtggtcactaggggtatagcttctggatggtcatataaattgaacagaggataagtggagcccttttttcatctcttccaaaatatgaaacattgcactgatctcggtggaaataaatgccaaagaggtaagtgtttcaagaaatgaaagcctttttttatctaaaataattcatttgtgtcttatttatttcaacaacagctttaagctcctagaacacgctgtgtcaagcactatgctaaccaggtacattcagaaaagcctgatacaatataataaaatgccctcaaataattcaaagcccaagtattttgtatgagtcaatggagagaaagggcagtcatggcagcaagaaatgtaactgaatatctaaactattgagaaattgtgatataaggcctttcatgggtcctgtgctcctgcccaactcttacatctgcaaagtttaaatgtagaacttggggtgatttttccacggagcacacatgatgtttcccctaaaatgagagaggatttctaccaactaaagatattctaattcctacatcaaaagttcattgaaacttttttttttttttttgagacagtcttgctctgtcgcccagtctggagtgcaatggcgggatctcagttcaacccaacctccgcctcccaggttcaagggattctcttgcctcagcctccccagtagctatgattacaggcacccgccaccatgcccagctaatttttgtattcttagtagagacggggtttcaccatgtgggtcttgaactcctaagctcaggtgatccacccgcctcgacctcccaaagtgctgggattacaggcgtgagccacccattgaaacttaatatggaggaaagcactgtgtttggggttggaaggatataaagggaatcaagtaggatctctgcactctggtagtttgatgccttgtcctcatgggattcacagagcagtcaaggagaccaaaataattgctcgctagaggtagaaacttcacatttggaagcacagagaatcaggaaaactctaaagtggaagcaaaaagtttcagctcattttaaaatttgattctaatttcgacgagcgatcgcttgagatggaagtgacatccatcctgtcctacagggcaggcagatgcagcttgttacaggaggccagcttaagagaagatgagaattgatttccttacagagcaatgttaacaattttgcaacttaattgtaattcttaaagtcagatcatttaagagcggaggaaaagatttttctggagaagaagctcaatttaataaatcctttgccgagggatttgctcaaacttttggtactcacccaagcatttgtctgaaaagagttttgtcttctctcgccattgttgcaagatactggtaaggaaagctgtttgaacttcctcaaaacatcaacatttaatactccttaagtttccaacaggaaaacgaggtaagttaatattttcccatgttgatacataattgaattagagttttacttaacttaataaattgccacctggggtaatagaaccatgaacagcacttaatttcaggtctgcattaactgtgctttctcactgccccggtctgagtgcctgttaccacggctcccaaaggcatcagggtaagaaaatcattttcaagaaagttctgggaacaaactgtgttagcttggggaggctgaaggtgggaaattagggtcatgttcatgcctgagtgcactgtaccataacacacactgtggttgtagtttatattataatacgtcaagactaaggaggtactcccggctcagatcaggtagtcctctgcaactatctagaccagcgatgtacagtgcatctccagctttatattgctgggaggagaactggacttccaaaagttttgatgtaacttcactcatgaagatttactatgctcagttccactggtgaaaccctttatgaagaactcagaaaggtacgcttcggtttttgtcagatttgttggcaatctctctgtgccacctgccttctgtaacctttagataagtaaacccaggagtggtgaagcctgatctctccatcaatctcaagttactattgactcaaggttcattctaactccaccataacccaatttttaaaaacaaaaatgtctttgctgagataataaagaagaaacatcatgagtttctacaaataccttcaaaagacagaatccaaacagagtaagagtataagggtttgggggtttgttttcatattttctaaaatgatataaataggtaacaaagacattgagtaaactcaccaggagttggattaaaaagtccttatatttattatacagtatctattatatccacaataaaaaatgaagagaaattgttgtgaagcaaatctttactgaaaaacaaaccttcagcaagaggttcaagagattcccaaaggaaggaatttaaatgttgtttaaatttaggctaaataaatccagagggctattcctaagagaaccagggcttagtgaggactggcctgcctgtctctggtcatttaacctgattttttatcatcttaccattgccagccttctgcatttcctagaaccagctgaatttgccaaaagaagtattaaaggaaaaacacactaactttgcaaattaagaactggtctttgccttctttatgttttgaaactcaaaacagacaaattttctatttttagtagactaaaaagagtaccctagaaatgacctttactttcaatacctgaacgaaccaagcgtagtgatcctaggaggctgttatcagcccacatttaactgaaattttcttgatactcctaagtcttagataactctttcaatattgtatcactaattcctaacatacaatcaatgaataatctgcagaatggcatgtgtgagtgtataacactgaataaattcatctaaaatatacatatttataacttagtagttacactttctagaaatttccccttgttttgaaaagaatagcagtagcaacagaggcaaactggcctatgactgatgttctaggagagaacagaaatttaccacccaatgtctttgccagtagggtggaaagaacaagatttacaaagttggctatacacctttaaatgaaattatatgatctacaattcaatgtaattttactatccccacacaagattacctggccttccgcatcacacttggcatgttaaggaagtgggggcaggaggcacaaatttgtcagtaacctactatactattagacacagttaattgtctatcattgcatgtataatattacatcaaaagtctccctcaaagcaagttgttatttcatttgataaactgcagcccggttcatttttatctgccgcctgtacttcccaacttgtatgtctctctactgagtccttccataaagccatatttcatgtctttgaaaaatgatctttacatgcatttctctagtagtataatgtccaatgattttttgaaacaaaatttaaattggttgaaagagccccataacatcatgataactaggaaaaaaagataataattagaaaagaaattttcatactttttatgagtaagcaaaccagtttgttcagactctcaacattacaagttggcgggtggcggggaaactagtactttctacagtaaagatacaacaatacatcttattcacatgtgtgcaatacagaccaggcaaaagttgaatctcagctcctcatttatattaatacttctgtgaccatgaacaatttgcttaatatctgggggtctctgttttcccatgtgctaaacggggaatataaaaactacttcacaagattgttgtgactattaaaaatgcaatgcaatctaagcttctaaaagaataccaaggagatattaaatgttcagtaaatgctagctattaaatagaaagtctcacactgacacttctatctgagaaaaccaagaattgaagctctgttttgcttccttcactctgtggtgtccagccaaagccttttgtgtctgtgagtaaacaggaaagtgcccagaaaacacctcaaataattgaaagccggtttgacttgaatggaggcttaggtcaaatttgcttccaagtttcatggattagtgctaattgtcccttggtgtcagcctaattttgcccatcaataaattactggttcacatttttggtggtgttctcaaaggcaattcagcctacattattcaagacggattacttcaaatgcaatttgaaaaatggggagagaacataatagttaatccttagaaagagaattcgcaacaagattgtaaaacgtttggttaaatactagactcaggatgtcgaatgctgacatgccaagtacagtactttccaagtagggaaattcagggcaagctgctcatttccctggaccttctccttcactctcacctcctttctctttctatgaaaggttctcccagccttccaatcactgctgctatccaactttggccaccatttggagagcaggttggaaacaggatgggcaagattgaacaggaggaaggccatgctcccatgcatgtgaaaagaccatggacacacacaaaagcacactcaactgcatcttgatacctcccaaaagcaaactcctgcagagaacttcaggatgaacatatgtttgcttcattacggagcttaggatattctatacctatctgaacttctgaactatacagatcagttagacggcttcaaatcatcatggtgcttttttaggaattccaaattactgatgctataaggattctgccatattctcattccctttctcattcccaagggtcctgagaaattatgcatttgggtcattcccaaaatgcatgatttctcaggacccttgggaatcaccattgttattttttgggaatcctaaattactgatgctataagggtcctgagaaatcatgcgttctactagtttttaatttgggcatgggagaaaggtatttgagcacataatgaaagccagaggccctttctctagttaacagttgtatatacacatacacaagcaaaggagcaaaattttgtgtacaaatctcaaatctcccagatctcctgaagtccacccatgattatcctggtggggcatgaaccccagctgagatcatgtgatctaaccaaccccatatttttttaaattaaaaaaattaaaaacctgaagtccaaaaggattccagcaagattaagtaacttgctcaacaaaacacatttgtcaactgggaacgaaacccatatcatctgactcctagttaaattctatttcccctagtaacttgtttttctgtcttccattgtcttcgtggtaaaacaggatgttacttgcctacttcatgggattcttagatggaatatttactaaaacttttgcacatcataaatatttgggccagacatagtggcttacacctgtaatctcagcactttgggaggccaaaaaataggaggattacttgattccaggagtttgagaccagccttggcaacatggtgaaaccgcatctctacaatacaaaaattagctgggtgtggtggcacaagcctgtagtctcggctacccaggagactgaggcgggaggatcatctgagcccaggaggcagaggttgcagtgagcagagatcgcaccactgtactccagtgcactccagctcaggcaacagagtgagaccctgtctcaaaaaataattaattaattaatatttgcaagtaattcctccccacaaaacttgaatgtttgtcattatttgcatgatattaataacagctaccctcattacagatgaattaggcaaatcatcttttttaaaaaaaaaaaaaaccttgtagtgttattattactaggcaaatagtcgttagtatacaacagttcttacattgtgtactcagatttggttatgataaactcaacacagctacagcctaaatgaatttatataaaacactgacagaggctaaagttattatagctttagtcccatttctatttagaagagtgtagaaatatttttcctcaggagaaaaaaaatgaaatgtagacatgatttggggtttggggggtgtttcgtgtttggttttcccaggtgccccaaattaaactaactcacactttctggctatcactcaaactgagttgacttggctactgctttcccagatcctctaaaaactaaaggattttcttctggcattttaatcagtgattaactactcccttctttttcctgctgggttaagtaaaagatccatatgctgggtgttctagggaatttgttaggctatagatcacagccgtggtgccagccatgatgtgtctcaagggaactaaagaagccataaggaatgtcaagagtcaccgggttaaagccacattaagacagctgttacgttaatgaaggccctgcttcgaagaggaggtcactatatggaaaagtatgaactactgtttattggtttgatcccatgtcctctgaaagttaatgggccattattattatcctttgacattcattgagccagatgagaatgctgggtgctgtacaagctacatgggtttgaaatatattctgtctccatccttagttttgacaaaggcaggaatgaaagagaacaacaccgaacactcctcagttttccatcacactccttgtctgatctatttacaataaatgtttatttttccttactcacattgagttcagagctgatactcggcctattttaaaaatagatctagtgccagtggctcacacctgtaatctcaacactttgagacgctgaggagggaggatcacttgagtccaggagctcaagaccaacctgagcaacatagcaagaccccagctctacaaaaaaatagaaaaataattagccagacatggtggcacacatctgtagacccagctactctggaagctgaggtggaagaatcacttgagcttggaagatcgaggctacacagtgagccatgattaagccactgtactacaggctgggcaacaaagtgagactctgtctcaaaaaacaaacaaacaaacaaacaaaaaagcagatctagtaggtgggcttggccagttacagaggacaggtaccaaatcctggaatatagtggccactcaaaagaggcatgattggacctcacataacatttgcaggtaattgcagaactataataaaagcaaagtagatttgaaacatattatttataacattgttatatataatatactattatatgatttaatttgtctgcccttttgattgtgatacagattttttctctgcactgttatattaatatgcatgttaatatcataacattgatatagtaatattaatgttatgttaatataatatttatatagtattatataatattactatatcaatactgtattaaaatatttttctattgaaatattatgacttagttaataaaggttatttctacactgtgtggtggggagaaacactctgtttcccaatgataataggtttcccaactttaaaacaccagctctgtgaaccttggtctatctacaactcttcctttcactcaccttcctccccacttctagattacacaatcggttgtccattctacctctgaataccttcaccaccatctcttccttgccattcccactgccactacctatctcatgccatagcccccactccctgtcacatcaaatgtgagctcactggcctgaaacccaagacctccataggatatcctcagcctacctaccaaaccctatttcttccaccaccctaccactccttacattctaatcaaactaactattctcccaatatgactagagtgaaaaagaaaggttatcttacgtgtagcccaccacttctacctctctgtgcctctgctcatataattccctattactaatatactctccttatgcacctggtccagtgaatatctatctagcccggaaagttcatcttaaatctgccctctgggcccagcacaatggctcatgcctataatcccagcactttgggaagccaaggcaagtggatcgcttgcacctgggagttcaagaagagcctgggcaacatggcaaaatcccatctcttcaaaaaattatccaggcatagtggcatgcacctgtagccccaactatctgggaggctgaggtgggaggatcacctgagctcaggaggtgtaggcttcagtgagctgtgattgtaccactgtactccaacctgggctacagaatgagaccctgtctcaaaaaaaaaaaaaattaaatctgccttcttcatgtacctctcttcattccttcaagatctcatcccttgagttcatgtcctttgcagggacatggatgaacctggaaaccatcattctcagtaaactaacacaggaacagaaaaccaaacactgcatgttctcactcatgagtgagagttgaacaatgagaacacatggacacagggaggggaaaatcacacaccagggcctgttggggggtggggggctaggggagggatagcattaggagaaatacctaatgtagatgacgggttgatgggtgcagcaaaccaccatggcacgtgttatacctatgtaacaaacctgccccttctgcacatatatcccagaacttaaagtataattttttaaaaaaaggttgggcatggtggctcatacctgtaatcccagcactttgggaggccaaggcggccagatcacgaggtcaggagttcgagaccagcctgaccaacatggtgaaaccccatctctactaaaaatacaaaaatgagccgggcctggtggcaagcacctgtaatcccagctacttgggagactgagtcaggagaatcgcttgaacccaggaggcagaggttgcagtgagctgaggttgtaccactgcactccagcctgggtgacagagtgagactccacctcaaaaaaaaaaaaaaaaaaaaatctcatcctttcctcttctcaactcccattgcactttttctctttctgcacttatcatgtctgtgttatttttaaattatttgtatgtttatttttttacctttcttagattgcaactccttcagagaactgtcttaattgatcttagcattccttgactttcctagcactatgatgatcatatggaagtttgaagaaaacaatctctctgactgagctctgcagcctggaagaggctatttctgtaaaattctgtaataggagagttaattagctgcatctatgaacgtgttgatcaatctagggaccatgtcaactgactagtccactgctgagtccccagcctgcaaattaagaatctggaaataacacacaatatttgcagacaaggtgacttaacttctagggtggtgaggagttcgaggataccctacgatatctgccatctttcaaacactgttttactagctccaggaagtagttcttcattaatgatgaaaacattattctatactctatagaaacatattacatctaagtagcctttccagaaggttcagagcacctctaagagttcaaaagataattcaacatgttctttaagtaatataatttcttgaaatgcttcttaattataaaatcgttaaatgaaggaatttcatgttatgcacctttgcacattttcataattgaaaggtcacagagatgaagcgtatgggatccaattatctctagactcactttgcagctatgccaccttgggtagttacttatatagtccaagtctcagtttccttatttgtaaatggagagtagcaatcatggtacccacctaggattttaataatgattcaatgggttaattcatgtgaagcacttaaaatagtggctgggacagagtaaccactcaaaatttatttgctcttacttgtgtatcacccccaaagtccatatagtgctggtgtacaataaggattcctgaaaagttgagttagtcacatgaagtggtggacttctgtgtgtcgtaaatgatatagttgtattctgtcagtaaataatcaaagtcctaacaatatgcatccctagtaaagggccattcctaatacatttttgggggggattgacatatgttttagatgagaagatgcttgtttgtttcctgtctggactgaagtaggacacggaggtttgggcaacagtacctgtactcgggcctcggtgagcttcgccctctgggccagttcctccctagtataaatgtcagggtaatgagttctctcaaaagcacgctccagttcctccagctgttctgctgtgaaggtggttcggcttctgcgctgtttcctctttagtggtaaatctggttcagagtcaatatcagagccttcatctgattggggtgctgaggctaaaagcacagaagaacaaaacatcataaaatgtgaatcaaaaaaataaaactgagattgaatccaagttctctctccgactgcaagacaccattacagtgatccctatacctaaagtaaaataaatgtggatcaaaaaacaagtctaaccaatccgtaataattcaaatcctggtctacagtgcattcccaatgtcttccatggacaccaagcaccccgcccccatgcagtcctgcatcattaaataatatttaatctcttctcctactctatctttctgccccctaggcagaaataattgctcatagcatctgtcattctaggccaattatgagctcttagaaaacagggacaggccttattccatttgtatggccctatgcttactacttaatgggtgcttccttcgtgtctaatgaatggatcacattgagttttgtttctgataaattttcaccaacatttacattatgaaatctgttaaatgtgatttttaaaaatattccaaacttgacttagtacctaagaagcgagtaacagttaactattcccagattcctatatatttatagactactgctcttataaaaaattatatttaaatcagtatctcatcaccagatatggggaaatgctttaaagaaaatgtatgtactattaaaatgtaaatctctagaactgacctgagaagaagcaggcaggcattgtcttgtgaactgtccctaactagagtctgggtctctgctgagtgggcatctgtccaggacagctgctttatttaagaaagccaatgcaaaaaaaaaaaaaaaaaaaaaaaaaaaaagtatgatcccttttgtaaaaaaatattatgagtttcaagaaggcaacaacagatcattaacccaatcccagggccttctgagtgtgtggccctgagcaactgcataagacaaaaatgtccctgaagccactgtgtggtggcctaacacacacaaaacttgtgtgtatttgcctgtactcacatgtggaagggaatttcaaaattgagtgggcaggtacaggggcaagagaagcgggaagtgggaaatttgatacaaattacgttaatgatacaaaatggttagtactcctgtaagaacagggtctgaatctgtggctgcaactagcaaaacctgggcacaagtggttccatttccaggccagaatttgatgagggcaggggtggagcaggcattttccctgtttctgctaggaatgcattagggatcccatagcaaagtgaacccttacagtaatagagcaacgctggctatagagggttctgcagtgtgagggagaatgcatcagaccagggctacaggcaggaagagcagccctctcccgggaccccagatactggggtagtgggcaaagatctatcaaagggttatcaggccatagaccctgagcctagagggggaaccagagcagcctggctcttgaacacatccaaatgtgctctgaaaattccccaaataactaagggatcctgtaaagaaggggccgaggttactgtcagcaaatgcaacagtaagccagaaaattgtagattattaatgtcaatgtcacactaactcatttgcaccctcaggctgataggacctggggaaatgaaggtggtgctagaagcaatgtgaatatgtgtaagtcctttacttctaattctcttttatcttaaactccaacttaactctgccctacagaaatctaaaatttcattctatttcagtagaaattttaaactgccccaaatggtacacatccaaaatgaacccataaatgtgattttcagttttctaacattttactacttccatactttattcacatctaaatattatgaaactaagaggcaatagagtaaattaataatgcaagtgataatttttttaaatatacctgaaaacaaatacatgtgcataaaacaaaagagaagtattacatattatttttgatttttcaattatctaatttaatataaaattatttcatttaacataaatcttacgttaggatattttactactaacttaaagaaagaaaactagactttctctagctatggcaatattttaaaggacaattaacatgctaaaaaatacgctatgcattgcattataaactccaaaagctcccaatgcaacttatatacatgtatgattgataaatgtaagctaaactaaatgagcaataatttgtgccgagtcatagaacagtgtttcataagcttttggagcattaggatgacctggagggcttggtaaaacatagactgatggatccccttccatggtttcaattcagtagatctgaggtgggctccaagagtttgcatgtctaacacattcccaggtgattgatgctgattctaccgaccccagataacactgcccacctctatagaatattctagattaattcttgtcactctcaaaattttcaactctgtaaaatacatctgccacaattaactgaaagtcactcccacatgtatatttttaaattgtgaacaatgtgctccctaagaaacaaattacgtattcccctaagaagacaaatttccataaaatattttccttcagtgcttccagtttctaacctttctttccaaagtgaattcaggtgaaacactcaatagcatttaaagactgaccaaaaacttcctctgcccaagagaaccctaaatctttgcttgtacattctcttactatgatcccattaggataatagtatgtggaaattttcatgtttcctttgggagtctctggggttattaaattctttcaagtaaatatgatgtgccatgcactgtcagatcaattaatcaaaatcgtctctggtttctgaagaaaaagaatggttagatttacaagcaccagcgagaattaatcctgagggtcaagaccatggtgtttcaccttaaaaatcaacattccccagaatataaactgggtgagctcaaagcccttctctgccttgttcactgctggaacccttagaacacagtaggcactcaataaggacacgttgaatgaatgccaagtgtggggcaaatttcagatttgctccaacactgatttatttgccactgttttacatctttattcttaaaatggaaattctcctcttatgacatctcccaacatctattcagatgggctttggaagtctgtgaggcctgaacaatcatgttgaatgtttagcaggtatttatatacctgcattgtttggaagaatgattaccaattttttcagaggattgtgggcttttttaaagatgaaaactagcatagctagtaatgaaaagcctcagaatttgggacagtacacctgtcaaacaggaatgcaggtatcctaaggtgagttcagggaggacagaaacttccagtggaggagaagggcaaaagctcccttgatcctgactttgagtataaatataggccatgaaagcagggcctggtgattctttaaaagaaaaaaaaagtctcagaatttaagagttcaataggacagccgttaccaccaaaaataaaactctctttaacaagcttacaaatcactactcttacttctagactgtttattcaaaagcaatggaaaggttgcatctaactgggaaaaccaccatatagcataatttcagaagatgttgaggaaatgatttgcctgatttttcggctggaaacttatttgagaaaccagataatttttggcaatatgaagccacaatcttacaagataattctaacttttccccatctgtaaaccccaaagggatgtgggctttaaaatatgtaaagtcagcaacccaagattaatctgccggctaggaaaaactagctatttctaaacatggaaatactactatttcttatatcattcaatagaaataaaatttatttgtacagcacttgattcacaatgatcaccccaatttgaatcatttcatttttgtttgtttgtttgttttagagacagggtcttgctttgttgcccaggctggtcttaaactcctgggctcaagcaatcttcccaccccagcctcccaaatagctgggactacagactcacaccacctggcagaatcatccagtttttaccaagagcaaaactaaaacttaaatcccattttaagagcacataggagggccatttttttggatttcatctattttacatactcagttttacttaagctactagaatcaattggataggagatacaaagaatctaattctaaatattacacggaaagtaaaaacaaggctttctttcaggaagcttaatagaaagaaattatatcttttttctctatagaatatctaatgctatgatttggaaaccacaaatgtgttagcaggacagttgtgtaaatgagttaataaattgccaggatacaacaattagattaaatataaactctttggactattactactgtacaactttaatattaagggaagattctaaattacacttaagttgctcaatcatattttacagatgccttcacaaagaaaatttccttcattattagagatactcttcccaaatttgaaattccagaatagatctcataagaaaatccatatcaatacatcatgcacagcattctaaatggaaatttcattgctttaaattgcaaaaagatgtagattttatcccaatctatattgctatcagatttagaaatttttgaatctattattaaaacccctttacaatccattatctggcttacccattagtttaactcaatgtcaccaatgaccctagagcaacgctttccaggaggatgaggatttctctcccttcccccctaacttcacagcaatcctaggaattagatacttatcccactgtacagaaaaaggaaactgagactccaagaggttgttcagttcatacagctaaggaagctagaatttgacccagatctatgggacttcagaggacatgcttgctggcttgcttctagcttagagtatcttaaatgagtgttgagtcttttatcacatgcacacacacacacacacacacacacacacacacagttcttttgaagaggaataacagaaatgaacaaaaacagaaattcaaatatcaatcacttagctaatcaccactattgctaccatttatcccaaattttgaaaaactgccctgcataaaatgaaatctacagaactactagagttggatcaatattatacaccaatccaaacgattttccagtggattcaattcaacaaatacttatttaaatctttgtatgtttccaaggtatagtttttaaacaacaataaggcactaagaaataaatcaactttgccaagatattaaatggatttaagaaatcaaagtagttcatctgaccatttgcagtctttactaagaaccatcacagaccattgatatctagggtcagtctggaacctgccaataatcataagctggtgaactgattattcattttatatctttattaaagttttaattttggtattttgtattacaatgaatgtaataaaaatataacaagagctaaaatggtcttctgaagcaaaagtgcaggaaggaataactggaaacatatcaggatattctcaggttattcagcagaaactccagtgtgatcactgaaagcatcacctctcaccgaagtatttcaactctgtgctttataagaaagttcgatctcaagctaattttagatacaggagccaaattgttagttatcctaatcatctcacattaactcccaagattacacttgggaaaatggacattgtcagtaaaaagaaagaaaggatcaagcacagggcaactgtcatacccccacaggattacaaactcttccttcagagacaaatcaaactgggaggagaaggcaaaagtattaccaccagcgggctaaccatgaagtttaattaaagaaggaattacagaattagagagtatgtctttgtccgttagccccttgtgacctcctctgtagcctcgggaaatatttcatcctagttaacactattatacatgaaatcttgcctcaattttatagggatttagtcatgtggaattctgtaattattggtgttcagacaaatataattcagagatgggagacaggcaaaaaatggagaaacaaaataattcacaagcatgaattttgtacattgtctttcttctcagcaagacgtttcatttgaataattaaagaatcaaaacatgacaaccatttaaattctatgtttgccctagatataatacaatgtgatttacagacatgggaggaggtggagggatctctggaggctgaatttcctagtcataatttatttactataagatggcctcataccaaacccgatggtcttttcgtcagttttaatctttctgagctagatttgtgagcacttttactcccagctgtgtttcactgaaaaaagaacaagataaaaataagaatccttcctgagagctccatgaagcctttttatactgcgagtctgatcacttaagggtatttcacaagtatattccagaaggtctttaacaggtcaacttgaagtttgatgaacctacttggctaattgcagaaggtctcctgcgcttgtgagttttgccattcaacgtgaagggtacaatgggacaactaactgttttctgatctgaagtagcccttttacgctgagaaagatgtgaatgacctctctcgtgtttactcgggtgaaagtcaggaggagtgaagcaagactgatattcctttgcagacccagagtaaatgacaaatgacattttccctttgtgatctttgggatttttgttgacttatttggaggcttttgttggatcccaagaaatggcctgtggctgaggcctattctaccgatttccacgctccatctgtggaatccatcagcagggcatttaccctcattcagggttctgacacctgcctggcagggcgcaggagacacaaagaaagctggagtggatgagaaaggggaggttggggtgggtttttttttcagagagagaaggaggggggaggttgaaatggatacacagtaggggttaatccaagtcagttgagagacttcagcacctggaagcttctcttccacattaattcacaagctaagaagtaatcagcgatgttatttttaatttattttaaaattgtatatatgttgagaaaagaaaacagatatgcaggtggaaaaaaaacagagatttaaaataaaattttaacgtgtagctagaactgtacattgtgtaactatcaagccatacattgaactttccggaattcttaacccagaactagggtccgagtaattgttattttgataaacaattgtgagttgataaactgggagggatggtttacaacctgttcaatggtctatttggtggtgggggtgaggggtaggtaaaggggtctcattttgtttttattccctctatgatttctccccgaaatgtgccagcaaaagactctttagcaagtgcaaaaaaaaaaaaaatagaatttttgggaaggatatgctgagctttcttgagcaaaggttctttcaagaacactaaatctaattaagaccctccagccatttacctactcttgttcctgcccagcagtcccctattttttggctggagaaaagtaacgctattcccctcccttctgacccaagcccttccctcggaagctgccgtctcacagcacgaggtcattagaaggaaaataagctcctgccaggttggggctaatcaaaatagcacaaataaaccctgacactcaacaactccccgagtgcctgctgccctgggaggagagtacagattggttatgaatatggccggccacgggggcagtacaggagggcctggccgtgtgctccgttgctccggagttatttttaatgcacaacatggactattgggtgtttgtttaagataagggctgacaagcagaggttggcggcacggcaagctgcctctgaagtgctgagctgcgcagccccaaagccccccaacatcctaagcttctcagaattttgagtttcaggtgtgtgcaggatttctatccacatttccttgaggaaactttctctggatggagttctgtctcaagccaccacctgaccattggtcatcgaaaagtcctcctttctaacaacagcagcaaacaagaaaggcttatttctccttcattcattcatgcagccctgctagtgattatttttagtagctgtattcactggtatgtttatgtaaaaccatgcttgtgtctttttcaaccactcatacaagcaacattttgcttaaaggagccacaaaatacccaccaacccgtacctgtttaagcaactcctttcgaaggcttaaagtgaaggaggaatttgttattggcttgagaaccctaacactgacccaaattagcccagtggcttcttatgtgtgtatatgtgtgtaacaagaattccttttacaacacgaatgacatcgccctttcctacagtctcctgcaaaagatttctatttgcaattgtttttaacggctttttaaaacgccatggtaactaccaccaaagcatttcaaagagaaaaagagaggaaagtacacaagaaaatgtgtccctattcaattaggaaaactgattaattaattaatcagctaacagcattttaagaatagtctcccatgataacaactttctccccacctaagagcttaaaaatcagtcataattaaaattaagagccagggctgctatctacagtaaggctccatgtctctaaaagcagtaagctaaattctagtttactgggattggattgcaaggggcgcagaaaggtaatttgcacactgaaggggaacaggaaaacagtagttctcgtgaaaggaaaagggccaagtgacttttatttacaattgccaagagagaggccattattgaccatatgtgccacaattgccctcttatcgcgggctggccatcatgtcctttgggagctgttaatgaactgggtaattgagctgctgacatgtgttaccaaaacaaaacaataggaagaagagacaaatgaacattttatttgccaatcagagtaggttcagcttttcacggagctgccgctaagtaactgactgaatacataaaacagtgcgttgaaagcaagcagatgcagacacaataatagttaactgacagcttatggcccatctgtgcttaacattttgttaaagaaattacttgacttgctaaagagacaaatcatacagctgccccgagtgctgcattataagagataaatcattagctaaactgtttcatgcttaaaatgacaatgcttattaacagttatgttgggacattttgtcagcacagcttgacacagttattacttactaaaaatgtgacaactcgtagatattcaatggaattgagtcagaatgaaagaacacttcaaacaatttgaaagaacaatgggcgtttttaatctctcacaattaaatatgcatttctaagatgttataaatgaaaataattaactctatgaaataggacataagatcatgttccctgtagtaatgatatacccttctgtcatttacatcttacttattcaaaactgcagaattttagaaatgcagtcattctgggttgattactatgacagaataaaatcagtgatcgaacaaaaaataagcagattaaagtcattgtttctagccatttcattttttcaacatatcttcttcctttggaaacaaatatttctttaatagggaaagaaaaaccatgttgtaaaagactagttttatgaggggatttcgcttatgtttttgttactacaactgaattgaaaccacgttttttttgatccaagtgtgtttcgtccattgaacaacttacttctgaaatcatagctatgtaaactggttaactagaggcagaacacagatctctcaaagcccttcttgtgatggattttttaccattatggacaaaattaacttaataatagtaattattatataagaaaagcagctacttactgacctgctaacagcttcctccgcccaatccctgttccctgcgaagtccttgctgtgcattttctttcacctttaacaaaaccctctttggagggatactgtcatccccatcttacagatgggcaaaaatgaggtctagagtgatgttacctacctgattcatgagaactcagagaggttaccctaatataaaatcatatcagcattgtcatttgagaaataggattgatgagggttgaaggaaaaactgtggccaatatcttcacttcttctttcttcttgatccactgagctaggactcagatatcacaaccctgtaaatcagttgtgaaaacataagcataaaaggtgagtaatactttcagtggtggttggtgtaggtggaaattatgttctgtacagttaccaagaaagaactctgcttatgaaatctaaaccttagctatatttacagaactttgaataagacatgagtgttcaataagtctcatgacataattgacaaagacaaagtactttgccttcatccttattttccactatcaaatatttttgctgttgtgtgcatatgttgtttaaaagtcaacaaataaacaaaggttcaatatgtaaaggagataacaagttagttatacagagagcctcttggagcaggtagaaaacaaaagaattctcctgtcacccttactaggacaaaactaccgaaagatacacaaaacctaaacagctttatccacaaggaaactttgccaagattagcatgacacgagatgtttggaaaataaaaaaaaggcaggttttagaagaaagttaaatactacactttttgtgccaaaagcctatgcaaagaagtaagaagacaaatgagtagagaattgaaaatgccaagacaaagcatttacaaaattgcagaatccttgaaaggagccctgaaccaatcccttcattatacagatgaagcccagagagagcaagtgaggttatctcaaatgacacatcatgaaagaaacatttattaaatgcctgagatgtggctgatactgtcctttgcactagggatgcaaatatgaataatatatggagcctaaactcaaaaagtaaaactctcattccagtactctttccactaaggcaaaagaaagtgtcagtgtacataggagttaatctagtcatgccctgtggcaacagaaagattaaatagcccatcaaagctgaaaaacctagatatgttatttactaagaaacagaggcatagattctgtgatctttagtataaagatcaaaataatacataaatgcttttaacgacacttcccatatggcatttcaagattgtttctttgcttcccatcttctcttgggttctataaaaaagaaaaagggtagcacaggaagcttgttttgaaaatccaaatcttatctgggtcaattattgcttgttggaagattgaaagaggtaataactgaacataggagaaaactcttttcctggaggcaacagagaaggctgagcttaatccttgctggcaaaggaattagcagcaacatcaaggtcatcatcagaaatcatgcttgggatacctactgtgcaagaagtacttccctagaggccgtgaagaggggataatgaatgagaagagagtgtgattcctccccttcatcgtgcaaaagtataagtctcctgtctacaaggtggtccttcagattagtgtcacatccaaccaatggacctaggggaggaattggcaaaccagtcaaaatgactaaatagatgatgtaaatgatttatcaccagccttaggtagggacagctgctttttgaaattttgtctttttgtgtctaagcaacagttgccattgaacttagaagaggtgatatcaaaggtttgggcaaaggaagtttcatgtcatggtgatgtgtcctactgcttaggagagaggccaaactacttcaaatacccagatggccccttcctctctgatttgggacaagcttattaaccctctgaatccattttctcatcagcaaagtagggtttaaaacatctgctccaaagactggtttttaaggaaaggagatagtttgcaaaacataacacaattcctgatacacaatttatcctcagcaaatgttatcccctctgcacctattccccttcttgttaaccagtcctaccaggcataagggaatagcatgtgaagaatgttccctacatcctaagactgagagagaaaaatcaccaccaaagctttgcaggtatttgtagaagtcccagaatgtgtacaataagcatgatccaatctcccatctgcttcctcttcagaagaacccgcccatagtcagacagtatattgttcaccaaaaaaaaaaaaaaaaaaagatattcagctcttgctcattcccaattcccttaaaaatccaaaacaaagatcaaagttactcaacttcacctaacccaggacctgtatctgtactgtgagatcaaaaattaggccgagtgtggtggtgcatgcctgtaatcccagcactttgagaggttgaggtgggcaggtaacttgaggccagaggtatgaaaccagcctggccaatgaggcaaaatcccgtctctaatgaagatacaaaaattagctggatatgatggtgcacacctgtaatcccagctattcaggaggctgaggcacgagaatcacttgaaactgggaggcagagtttgcagtgagctgagatcatgccactgcactccaacctggacaacagaacgagactgtctcaaaaaaagaaaaagaaaagaaatagaataaaattaaggtagctatgaaagtaaataaattcagtgctcccaaatacctcagggcctaaacaggaaggccaagcttaacaaaagtcaggcaaccagcctaaaagaaattaagcacatgccaacatttagtttgattttcatggggaaaacctgaatatatttgcttggaggcaaattcttgtcttctctatgtctactgatatggatctgcacaggcaaaacaaagtataattgtgagcaattcaccttctgatcatttttattagtgtccacaaccaatgtgaataggtcaggtacccaacaccagaaaaacacaagaatttcttcagtagcaggtttctgcatgaattattggacaactgcctttcttttccacattgccttttcagggacaatcttgcagaactggagggaaatgaataaggaagtgatatgtgggagagagtaaaggaggggaggagagaagagaaaataactgaagagaataaaagaggggagaaagaagagaagagaggccaggcactgtggctcacacctgtaaacccagcactttgggaggccaaggcaagtggatcacctgaggtcaggagtttgagaacagcctggccaacatggtgaaaccccatctctactaaaaatacaaaaaaaaaaaaaaaattagccgggtgtagtggggcacacctgtaatcccacttactccggaggctaaagcaggagaatcatttgcactctggaggcagaggttgcagtgagttgaaatcatgccactgcattccagcctgggtgacagagcgagactctgtctcaaaaagagacagagagagagagagaaggatcaactttcctttctagcaaagaaggatagaaaataaagcaataggtggtttcagagtcaatgggttcaccatgaccactttttccccaaaattctcctctgacaaggctttctgagttaggaaagcctgctctgagggactgaagttgaggctgaggatctgacaatgtgtcctaatccctggcaactttaaataaattaaagcttttcctgggtaaaaaccaaaagtagccccactcgttcttcccacccacaccagcccatggttttaactggaaatcatcccatcactatgtcaagacagatgccaacatttaaagaaactactgccaattcagttcaaactcaagctcattcttcaccacccaatttacatgttcgttcctaagaaaagctttttgagcaaaatatgtttcttatttcattgtgcgtttttgttttcatactacaaaagtacattacattataaaataaaatttgagcaatgtctaaaaataaaaaataatgatagtcccagaaccaaaaagaattgctattgattttaaattagagaattatattatacagatggatgggtggatggatggatggatggatggatcaatagatcaatagatagatatagacagatccaactcctttgctgtgtttcttcgcattctttttttctgtgtaattattaacaaaatataagtttttaaaaactttcttaattacacattaaaaaggtaaataaaactctttcctccagcaagttttcaagtgaatttatccttgttattttagcaatagcacaagttgcttggttaatagtattgtttatatttgaaaatttaactttcttaaagttgttttctgagattataaagcactactccttttgatttgttcatatttacctgtgaatgcatttggatggccagatatgaaaatttgccaatttctctatatgagggctgagacaaatgcacatatattctcattgtctttgtataactcaggtgtctaattcatccaaacaaacattgaacccacttatacatctctccttctattctcacaataagttagccacaagtttaagaaagcttgtccagggctgggtcatcagagattgttgtccttacagcatccctcccaagtccatgtctttattcctattcaggcctcaatgaagtaggagggggctcttcaaatattttcttctttctgatagaagaagctagagcaggatgagagtgtgaatggctgagtttaagcctctgcacagagagagtgacaagagaagaaaaccagtggaagcacaggaagacaaatcccaggtaactaacaatgtaactaaattgcagggagaaaattagaaatagttttttaaaattttttcccactattagtcagagacgttcatgttttgtgctaaatgtgctgcttagcatagaattttaaaacctagaaatcactttaaatatcagcagaaaactctttactctagatttgaaaaactcaagaaacaaaaactgagtttcagaggaatgaaatgatacctccatcatcaactggcttggtggcaagttaaatttcaaacctatatctcttgagttctaaattctggcttttttcattttatcacatgatcaactcatttttttctgtggatctataggtgaatttactcctatattctaatggtagctagagtcctcctaccaccaacaaacccactgaatctgaaaattagtggaatgaggtggactcataattgggcccagagaggaaaaaaaaatttttttttagcgtcttaaccattctatttacatctaaccattatataatgctgttttgtttctgatttttaaattctcactatatctcattatatctacctcattacatctttataactactctgtgagttggatattatctttgttttaaaaatgacattgataaaagaacctgcccaaagtctcagcgggtcaattacatgtcagagcttcaaagataatcatcagtcttcactctaaatatgcattaaaatgtcctctggatcatctattgcttagtattattcacaaatttttttcactcaaataacatgtatattcaattactgattaataaccaattttataagaaataataataaattccaaagtaaattagctgtaaaatatagaaaactagtaattaatgtgaaactgaacatgtacacaaaaatctgctaagaattcactttatggcatttaaagttttcattagagtggaacaaaacgacttcccagaatttcatgtgcttgccaaaatggaccaactgtttgtcataacttggctccctcactgtctgtgctaccttgaatacctttctgcacatcttcacacaatgccacatgcaggtctcaaagcccagtttcacaaagcattcactgaacctcacagccatcaatgcccctcccttctctgtactgcaagagcattttgtactttccatacacaccgtgcctttccttggtaattaaactattgactacaacttgcaggtcaactcttgttgcaaccacacttatttctctgattgaccacttccttgaatttgtatccatttagctgtgtgtcccagcagtactttttcattttaaagggtcaaatagtcagaggtcagcaaagcaactagtaagtttatacagacaaatctaaaaaatgcaaacattgccttactaaaagcaggttttgagggagcttggttctttgcttgcctgttgagtagttttgtaaacaaaaaattagaggtcattttaagagaaatgtctttgtgtggtaaagtttagtggttattttgactgtcacaatgctacaaaaaatctgaggaaaggaggaaaaactggctgatggtatgatacagcattatcccaaaataaggaaagtgactgaggaccatgtgatcaattctacttcagtctttcataggcttgcagttaattttggaggcattcacagacagtaaacaaggaggctctttcttggtttcagtatttaccaatggagaaaaaaactgtgaacgtgtttagtaaactgtaacattcatgtaacttacatgttttcagcagcagcagcacccccaccagactgttattattacagtagataataaagcaccaattaaataaactttattagcaagaattaaattgaagaggcattatattaagcctttcagtttctacaaaaaataaaaacataagagcatgaagtcattttctctgatcaactaaatacacttgcccctttttttctcaaatgtcgtgattcttctctttgaatacaagaagacatcaacaataccattcctctctcagctcagaccctttccttgagtaaatctttccttttcccattttcatcttcagtcttaggccttaggaaaggtttactcttcaacttccagagtcctacatatttgtcaacaaagaggtttttttcttctcccgtttcaaaaaaggtttgagtaaatcctagcccaaaagtgcagtgttagaagtaggtccatgttttgcagaggtttgaagcttttccgatttgggaagatccactttaagaacacaaaactagctttcttctgcatagtctacaaaatcacatgaccacgtgacacattgtaagggccctttgcagagattcagaagaagcccttgcccccggggtcccgcagttctctccactgtaaattcacttctgcccatgaacctctggtgaagccagtcttcaagtgaaagacactttccttctatgtctgcccttcctgctaatgacacagtataaaatatccctaaataacagtaacgacagccctcccctgatccccaaatagcaggaacaatcaagtcaatcaatattcatgcttataagctacctagagtctttgataggagaatagggtttctttcccaattccacttgaaatcaacctaccttgacttatgagtaaatggagacatataggtcatggatagttcagagaacctcatgaataaaactgtggttttattttttgctttatgtcctacccttaaagaaatgtcttgagaacctggactttatcacaggtagggggatcttatgagcgtgattgcacccttcccatcactctgtttcctccatgtgcatgtctttacactcactaagcctcagaacacagctgaaatagtttgtgaaattctattatgaatgtatcttctgtagtgaatatgtattacttttgtgcaatggaagtagttccattattgggaagtaacccccaaaaagctttggtattttcatgagaatttgcaaacaaccttgagtcaattcaagattttagccagcatgtataatctttttgtccctaaaaaatgatactgctagtaccctcccaaacttgaaaaaaatcaaataccactaaaaattctatgcatgtcaattcactttgtaacatcttgcagaggaaataccttcaccacagaaacttcgaaaaaggtattatgaaaaagggaacatgggccagacataggccaaacttaataccctagaaactgaagtggaagaattggggcaattagaaatttacaagaaaaaagaatgtttttggttagattggttggttatttcaaggacaagggctttagaatttcacttacctaaatactatcttatatttctcctttatttgtatccaaagatgtggctttattctcttctgagatttcttaaattctaaatatgacacaggacctcatgcagttctgccccaaatgattcattagaaactaaatttctctacatttcttcacacttccaaataaataaaacacaaattttcacttatctcagcagttccaacacatgatcatttgagggagatttatttaacatagaagttttgggctgactgccactgctcctggattataaacaaaattgaaaatgcacatttgcatttaaagaattatctcccccaacacttccactgtcctctagaggtaaccactttgtggtcataaccaccctcaggtgaagggggaacactgtcaatacccatcacaatacatttttatttatttatttatttatttttattatactttaagttttagggtacatgtgcacaacgtgcaggtttgttacatatgtatacatgtgccatgttggtgtgctgcacccattaactcttcatttaacattaggtatatctcctaatgctatccctccaccctcccccaaccccacaacaggccctggtgtgtgatgttccccttcctgtgtccatgtgttctcattgttcaattcccacctataagtgagaacatgcggtatttggttttttgttcttgtgatagtttgctgagaatgatggtttccaccttcatccatgtccctacaaaggacatgaactcatccttttttatggctgcattactatgcattccatggtgtatatgtgccacattttcttaatccagtctatcattgttggacatttggcttggttccaagtctttgctattgtgaatagtgccacaataaacatacatgtgcatgtgtctttatagcagcatgttttataatcctttgggtatatactcagtaatgggatggctgggtcaaatggtatttctagttctagatccctgaggaatcgccacactgacttccacaatggttgaactagtttacggtcccaccaacagtgtaaaagtgttcctatttctccacatcctctccagcacctgttgtttcctgactttttaatgatcaccactctaactggtgtgagatggtatctcattgtggttttgattttcatttttcttacccatcacaatttcaccatggctttctgagattgccttgctacataaccagaatttaccaacagaactctaagaaaaatcatcacaaacataaatggagtgctacgagacaaaacaatacctccaaatcgaagatgtaacagactattccaaaggtcagccaaatgtgatccattgcctgtttttacctctgagctaaggatggttactacattacttaatggttgaaaaaagaagagtaacattgacacatgaaaattacacacaattttagtgttgataaagtctattagaatacagccatgctcatccattcctatattttctatggccgcatgctacaacagcagagctgagtagtgttaacagaggccagtggccccaaaaagccaaaaatattcactatatggaccttgacagaagatatttgcctagtctatatgatagccaacattttataggtgcttactatgcaccaggtgccatgccaagcatctttacttgctttccctcatccaattttcaaatcaacattattattataccccattttacagattgaaaaaacgaggctcagagaggttatatactaatagctagtctgtagtgaaggtagaattaacattcaatctctctcatgcagaagcttgtgtttatgaattttgtgacaaacttcatccccacattccgttaccaccaaagcccatcatcactatcaccatctaagactcaaaactcccattatccacagcataatgcaagtcccaatccctctgccatgtggatggagggatgccttgccctatctcgtgttattctcctatgttcagatgttaatgaatccagagttgtgtggaacttttttcccatgagggcccaggtctctgtgatgttactcaaccttatagggcaggtgtccaacttaatttatgaattaattataccccaaaactgagctattgctcagttcataaaaagggtgagaaccaggaaactctttttaacaggacagtagttttctaagtggcctggagtcttggtgctatgattagtttagcttactgatgatcattgctttgacttcagactcagtgacctctgacatgaaccaccaactactctcccagaaatgctagaaccaaagttgtcacctcactccccaatcctatgccctggtgacccataggctacttccatcatctctatctaaatggccaccaccagagcagcaagcttacctacttagtaaacaaagaagccagaagcagcatgaaagaaagaactgttgttctattccgaggattctgttctcaacacaaatgatcagttgggtgagctgcctaaatggtatggctcccagattccctgtctgtgaaggagtactaacactccacaggtagctctgaggaacaaatttacaggggtatcaacagactttggaaaacacagagtgcttgtagaatgtaaaatacaggtaaattatagtgttgaggtatgaaatgcatatcctggtttgacattagtctgttgactttctcaaaccctaaagacattttaggcattttagagtatgacttagcatccaaaacttcatgcaaactaagactctgaacaaacctaggtgatgcaccacagaaataacagtaaaacaagttgtcaaagatataaccagagtccagagaataggacacaacctacaacatacatacatttagacatacgttttgtttcccaagaaaaaaataagtcaaagttttaacaacctcactacaaaacttttcttttttttttttctttctttttcttttcttttagagacagaagaaaagagcctgttgcccagtctggagtgcagtgtcatgatcctagctcactgcagcctcaaacttctaggctcaagtgatcctcccacctcagccccctgagtagttgagtagctaggactgcagaagcatgccaccacatcccactaattttttttttaagagatggggctctcactatgttgcccagcctgttgccaaactcctgggcacaagcaatcctcctgccttggcctcccaaagtggctgggaatatagacatgagccaccacacctggccttttttttctccaaaatgtttctttaaatttacattcatttattcaccaaatacttacgcagtgcctgcattgtttccagttatctgcaaagcagcgcacataaaaagctgagcagaacagagctcacagtacagcaaatgacaagtttttttttaatatgacatccaatctccaggaaatgcctattgcaaattttttttttaaaaaaaagtttcactttaagtattcaaccagacatgttagatggttaaccagataatagttggacttctaatcccattttgtgttcagttgatatgttatttgcctggggaaaggagggtagctctcacagtgttttttcatcttacgttttgtcagtcttttctcaccttatatttagattggtctcgttgtatgaaatatgctcgtctgttctgacatgcttcctcttgcaataagcgttgtccagtgcatcacacatataaggttaccctaagggtctgaaattcagtttcttagatgaccaggaagacctttggaaatttgggtttcccacagtcactaagtattattttatcaaaaaggcatctggcagacccatctctggatctgccctaaactgatgtctccatcagtgtcataattacttaggatgcaagagaacattgtggctagctagaactaccaaaagatcccttagagagagttaataaatgattatttcatattgtttaatgtttctgatgatactctacagtataaacatgtcaaaaactcaacatcaacatggcatttatcatagactctcatatatttaaggctcactattaagctttacattttctattcttttcttttttctgagacttagtcttgctctattggccaggctagagtgcagtggcatgatctcatctcactgcaacctccgcctcctgggttcaagcaactctcctgtctcagcctcccaagtagctggtattacaggcatgcaccaccaagcctggctaatttttgtatttttagaagagatggggtttcgccatgttagccaggctggtctcaaactcctgacctcaagtgatccacctgcctctgcctcccaaagtactgggattacaggcttgagccaccgcacctggcaagctttacatttttaactcaggaagttggcagggcaagttgcagcattaatacaaactgagattttgttctgttcaggccacattcatttatagatttcactagtggggaagataatgtgcagccttcaaaaatgtgagtcatgggatctgattttgatgctgaatgaggtcattccactatggaggcatgtgatagaaaatgcctgccctgcctaaatatggtgaaggcttcaaggagataggctgagcagtatagagaccacctagctggagaatccccactaggtgatctcatgcaaatcatctaccagcacctgcatcagaatcacctgagctctttgttaaaaaggaagacttgggagccccacctcagtctgcaacatcaaaatcacttaaagtggtcccagaaatgttctttttaaataagggcctcaaagattaattgtaataatactgatacctatctagcatctaccatgtcagccagtcagtgttcttggcattttacatataggaactcaggttctcttgcaggcaactcagataccttgatgttaggaaagtactgacctacctagattttgaaggaagatgcacatagagtgaattccgtgatctgtcatatttagcagtgtggccatagcacatgctatttcacacgtctgtaatagaatagtaacagtatgcccaattatattctttttttttttttttttgagacagagtctcactctgtcgcccaggctggagtgcagtggcacaatattggccattctcctgcctcagcctcccaagtagctggcactacaggtgcacgccactacgcccagctaatttttttttttttttttttttttgtatttttagtagagacggggtttcagcatgtgttagccaggatggtctcgatttcctgacctcgtgatctgcccgctttgccctcccatggtgctgggattataggcgtgagccaccacgcccagccccgattatattatttactcaaagttgttagcacctaccttgaggatgagctttgttttgtaccaaaccctgatcttcgaaaccttagagtcatgggctcctttcttcctctgctatttggaacgtgccagaatcaattacattccaaggaggtaaactggccataaggcagatccttgtaagggttttcagaatttgcaggaagattttctctgtttacaaaaaaccgttcttccctccagccagcccggcagacagtgctcaccatcctctggacgacgccttgataggagcaggacgtcctctcatcccaataatgccatccctccctctcagagacccctgccgtccttccttgatcccttgggctcacactgaggcaggcacttcctgatccttccctctccctctccactcccactgagacaatccctcaggcacaaagaccccctaacctcctccaagtccctcggccccagagactcggaaactgctctttgatttctctactgcaaggaattaacttttcattaccagcagtctggaagtctcattttctcatgaatgcaaaattaaatactgtatataacagcatttttaaaactaatactcttttattttctcttcctaaacatcataaagtgaataatgcagtatttttcatgttatgcttcaatgacacaatttgttttagagaaagtaacctgacatcatctcagaaagcagtcattgcctttgaagaactcgctttccattttgaaattcgacagactggcccaaaacttattctacctctaaaaagacagatagggccacctactactaaactctaaactttgcttccattgtatcattgaaatggaccctgtacttgtgagatagttttgtacaataaagctaatttgagacaataaatataatcaatacgtaggtaaaatctgggaaatagtcacagaatgggcacacacagacacaccacaccatgggctcttttatggtaaggaaaaatagtagttggggacaaagataatttcaacacagatatatattttacaatgtctatgctttgcttaaatgtctccaggtgccttgctcttagcagggacacagtaaacatccgctgcataaatggctcagcattttttttttttgaccttcagataagtttctgttccttcacactcacttactattgaaatttaccattatgtttttatgctgtaacaattcaagatgtatgttgttttcatgtcttttaactcatagagccaaatatgaagggccaattaataatgtacttttatgttttaagcatagtactatgctagaatgattatttttctaccccagcagctacaaaaaatttgaaactccatagctagtgaatgctcaaaaaataattatttgctgttttgccatgctaattattgagacttgttctcagggactttcactgagatagtgcctgttttccagacgttattttaaacacaaccttcattttgtgttgaaaaagtcatctaaattgactacctgtctccattcatcttttcaaatgccagtaagaatgcatgtaccagtcactgtatgatatgttctcccagggaattatgcttaagaaaataaaacaataaagagtgataaagactagagggcccttcgcatctgacagcagggcagaagtcagaagttggggcctcctgaggctcaaggcagcgcatggctgggcaggaaatggggctgttttgtgcccaccagggcctccccagggtcacccccacgctgctgactgcatcgtcccggctcagggagttcccacaccacctctgtgagaacatccaggcagggcacagaggagctttgtaatagggatggacggcaaacccttctggggaaaaaggaaggaaaaaagaactgctccaagaaaagaggaatattctattcaagagacacccttccattctaaaacttagttttctagagtgctttcaagtgtgtctatattttaagttaaatccaattaagatgaatcctccaaccctagtggaaacaagcaaaaataaaagcaaacccgaaaaagatgaatccatattacatcatccagctttttcagagggaactatagtggtggaaaaaacaatatatttgtctgcgtaaaggaagcagtcatgtttttaagcctcaattatttcatctgcatagtgggaataataatatttacctcatagcatttctgtgaggatcaagttaggtaatgtgtgtgaaactttattattattacccattattagattattaacagtaagaacaattttctgatttcattattaaataatacttagtaaacctaatagggtaatttgaaaaaaaatctgaatacattatcacaaatttatttaaatatggagcttatattcacagccagaatgatgacaccatcaccaccaccaccaccctgcccctgcctttttgttgacctagagataaactttgacctgttgtttgataatcacactttttctgaagatgccttgttccttttaagaacaacagcctcaccccagagtctggaaactgacatgcatctatatgcttctccccttcctctgcagctccccaggaagaacctttaagcttgggacttgatttcccaacctcgcatactgtttgcaattacagaatatatggcatacatggaggactttcttaatctgagttttatggagtatggattatacctttctaatgttctaatgtgtggatctgaagttcagttcttaacaacaacaaaaagtctcttattggtgatgctgagatttctttttttcctgagtcttgttctctagaaccaaatctgcggttgactgtggcactgatttaaaacactttatacaaatcccaaaccctgaagcatactgtggagtgagctactaagccagcgtcaacaagaagactagaattaagaaactccttcctgaagactttttttttcaaaaaaataatcttaacatttcaagtttcctcaactaaatttattctgtattttgccacatctgcagcagctgagatctactttccaagagtggtttcttgcgaaaggaaaaacctacttttactacctcgaaatgaacacctaccacaaaatgagcacacacacggaagcaactaacacaacttatccaacagaacatcactgtttgaataagcccattctccacttcctgatacattctgcgatggaaattcttaattcctggaatcatatgacattaaaggcaggaatcacattgcttctgcctgttttatatctagatcaaaaggtaaggccaagagattgtacaaaacaaataagcactttacaggtaatacatgatatatatcaaatataaagactaggcatagcattctaccaatcaacatctattaagaacatcaaaatcaaaggggtttataactaagcagagaagtgacattgggaaataacaccggttgtgtttaaagaaagaaaaattcaagtgtccatattttttaaacatttcaaagccagagttgatacacaatttagcattcttacctttttttcatcttgtcataaaggaaaaaaaattaaaacttaataaattttgcctcaggatcagaaattcaggactttgaagtcatactttcccttttctaacagacatagataagaatttgctttacctaaaagtaaaatgccatttcagattgttgtgagaatgagtttatcatcttgattctgctacttaccagcagttacttactagtgaagttagcttcatttaacttttctgatcctcactttctttttttaagagataggatgtctctctgtcacccaggctggagtgcagtggcacaaacatggctcactgcatcctcaaactcctgggctcagtgatcctccagagtagctgggactataggcacacaccaccgggcctggataattttttaaaaaataaaatttgtagagatgaggtctagctttgttgcccaggctggcctggaactcctggcctcaggcaattctcctgcctcagtctcccaaagtgctgggattataggcatgagccaccatgcctggtctgtttatctttaagatggggaactgaatgctcttctgttgtacatcacaagattgaagtggcaaattaagactacatgtgaaaaaaaaactatagaaaaataagaattgcttgagcctgggaggtcgaggctacagtgagccatgatcatgccactgcactccagcctgggcaacagagcaagacctttctcaaaaagaaaacaacaggaaaagaaagcttcataatgatcactgctggatgatcatagttttactgtgctatttttctatttgttctttaactaagaaatcaaactccctttcatttacacatgtctctatttcaataccataaggtcatggtttaggaatgaaaaaactatttcaagcaacacaagttttttttttttgttttttttttttgttttttttttttgttttttttttttttttttgaggcaaagtctctctctgttgcccaggttggagtacagtgacatgatctcagctcactgcaacctccactccccaggttcaagcaattctcctcctcagcttcctgagtagctggaattacaggtgtgaacccccatgcccggctaatttttctatttttagtagagacggggtttcgccatgttggacaggctggtctggaactcctgacctcaagtgatctgccccggcctcccaaagtgctggaattacaggcatgagccactgcaccatgccgcaacacaagattttaaaataatgctttccttagaaccactgaataatcacctagagtcacttagactttttacaaatagttaaaatggactcaggctgtggccagaagcactcagcaccacatccttcaatgcagtgagtgcagtctcaatggagaattcctaaaattactatactgataaactttatccttagctattcatctcaatatacagttttttcaaagtaacctgaaatgcagactttatctaacccaaagttccaaaattatatcagcaaacaacgattttgtcagagctgccatgcacgcagtggactgccaggatatccacagccaccaactgctaacagcctccctcaaaaagccaagggtttcacaggcagcctcagccaaatttgaggctcacttgctgaatccttaattatattttaagctcattttcataatgctcacattgactttttaagtattaaattttaatcctatttgaaatgttagcaaacggctaggaaaaaaaatctaaatacctagcacacatgtcaatttgtatggaacattacaacacagcattcaaagttcactggaactatgcaatgaaattctacattaggaggaaaagatacgaagaagattgtaatatttctctaattgtcctcttctgaggcagaacagagggtgggtttctatcttcactcaagcagaaacaacaacaacaaaaaaaaaaaaaagaaaaagaaaaagaaacaccaacttcttaccttctacttcccttcccaagttcctgatattgcagtttttaatgcatgagtcagaacattggcctgcaaaccttataatattgcacatttgcaaatgcttttgagaggacccaaatgcttacaactatataaattaaataaatgatataaaagccatgaggagattgaccttttctttatgaatgtacgttaaatgtttcatgtttgccttcctgttctctgaaaataattttgagtgttgcttgacaaattagtaaagcagtttaaacaagcatgacaggcaaccagtatcccaatgggttcccaaagtagaactttcccagcaccccaaatagcttctttgtgcccctttggtcagttcatctaagaggcagttactgttctaatttctaccacaatccattggttttgcatgtattggaatgccagataagtagaatcagacagtatacgtagactcatatgtttggcttcttttgctcaacataacatttttaagatttatccatgttgttgcatatgtgagtagttcattcttattttattactgaacaagactccaatgtagtgtatatagcacaatttatttatccattttatcagttcttatgttggtggacttagggattattccctatttggactataacaaataaagctaccatgaccattctttttaaaaacaacaaaacaaataaacaaaaaaaagcatgacaattctattttttttctggtgtagttatcatactttactcaaccccccctcaccattttactaaaactgagcacttgcatagaggaaaaatttataataaaatgacatcctcagtttggcagataattttattaattgggtatgtaatataaatagattcatttttttcatcactctttgatttctaaaactctttaaaaccaatataaaacaacttttgaaagtaaattgttctcagaaggtttttttttttgtagatacagacaaactaattaacaaatttatgtggacaaacagaggactagaatagctaaaaacaattttaaaaagaagaataaagttagaggaatcacattttttgattttaagaattattctgaagtcacagtaatcaagacattgtggtataaggaaagacacagatatatatatggaacagaacagacaattcagaaacaaccacaaaaatatggacagtcaatttttgacaaaggtgcaaatgcaactgaatggagaaaggaacgacttttcaaccaacagtgttgaaacagttagacatacagatgcaaaaaatacattaataaaccttgccctaaacctaacaccaccacatacaaaaattaactgaaaatgggtcatagaactaaatgtaaagtctatattttcagaatattttcaggaccaaggctagtcaaatagtttttagatgtgatgcttaaaagcacaactgataaaataaaaaattgacaaattggacttcatcaaaataaaactttcattctgcaaaagccatggttaaaagaatgaaaaggcaatgtagagattgagagaaaatatttgcaaatcacatatctgacaaaagacctgcattgagaatataagaagaactttcaaaactcaacaatatgaaaacaaaatatttaacaatttttaaaaatgagcaaaagagttgaatagacatttcaccaaagaggatatatggttggcaaataaggacatgaaaagttgtccaacatcattagccattagagaaaaatgaattaaaacatttaattaaaattaaatgtcactaagaatatattagaatggcaaaataaaaaaatattgacaataccaagggttggcacagatgcagagcacctgggaattttgtgtattgctggtggaatgcagaaggatagagtcactctgtaaaacagtctggcagtttcttataaagttaagcatacagttaacatatcacccagaaatcacacttctaggtatttagagaaatgaaaacttgtgttcacacaaaacctctagacaaatgtttatggcaattctattcataatgaccaaaacaaggaaatagccaaaaccctcaactggttgtttttcctcaacaggtgaatgggtaaacaaactgtggcatacccattcagtagaatactactcagcaatacaaaggggtgaaatattgacacatgcaatgacttgggtgaatctcaaagtaattacactgattgaaataagccaatctcaaaacattacatactgtatgattccacttataagatattcttaaagaataaaactacattgatagagaacagatcagcagcttccagggactaagagcagtagagaatacaatttcaaagcgaggtttttggagtgatggaactgtgctctatcctggtagtgatgatgattgcataaattagcatgtgttaagactccaaaaaagatcaaatacaagttcatagcagcactattgataatagtcaaaaggtagatgcccaactgtccatcgtagaagaatggataaccaaattaggatatataatacaatggaatattattcagccataaaaagtaatgaaatactgatgcatgctacaatatgtgtgaacctctaagacataatgctaagtgaaagaagccagacacaaaagatcacatactgtaggagtctatttttgtgaaataaccagaatagttaaatccatagagataaaatgcagattgatgattgccaggagacggatgggggattgggaagcaattgcttaatgggtcccaggttttctttttgggtgattaaaatgttttagaactagatagatctggtgactgcaatatgttgtgaaaataccaaatgccattgaattgttcactttaaaacagttaattttgtgttacgcaagtttcacccccacacaaagtaatccaaaaaagtctattttaccatgataatttcaaaaaataaatttaaaatcataaaaagaaagaaactagaaaaaaaataatttgtaactccatgcttagattacctccttgaacaaagcacaaaggaagagttaagttgttaaattccaaaggactttccacttcagtgcatcaggctctgttctttcccaaaatgctcctacaaaatggtcactcgcagcttttgcctttgaagactgaggcattctggtgacaggacctcttgtcttcaacttcttgccattctcacatgcaccatgtgaccattccatacctttgcccatgctgttcactctgccagtaataccatttattttttgcttcttcagctcattagtcatcctctaacactcagctctgagatcttctcttcaaggaagcatttcctgaacttggggatggccagacgaccatcccccgcattcccacagtgccctggactctaaaaagtacttaaacacatgagattgttgtgatctgctcatgtgaccatcttcccctccaggctataggttctggaaaagagagaatatatcttattaatcgctattttctccagtatctagcatagagtaggcattcaagagtggcttgtttgtgtggattttgctgtacatgtctcataaaaggctctaactgggtttctgggcaacgcctagtttctcctgttacccttactttaaaataaactattattccctaggttctacgctttccccgtagttctgttagcctcttgtgtatccttaatacttggagcaagatttttcttctcagccaggcctgtaatcccagcactttgggaggccaaggcgggtggatcatgaggtcaggagatccagaccatcctggctaacacggtgaaaccccatctctactaaaaatacaaaaaaatagccgggcgtggtggtgggcgcctgtagtcctagcaactcgggaggctgaggcaggagaacagcgtgaagcctggaggcggagcttgcagtgagccgagatcacgccactgggcgacagagtgagactccatcaaaaaaaagaaggaaggaaggaaggaaggaaggaaggaaggaaggaaggaagggagaaagattgattttgatttttcctctaaccttttcaggacactgagagttagaatatgtagcaagtcagacttttaacaattccagaatacgatgatgattttgacttctttagtttatgcatatacacacagaatctgacagaacggctagaattcttgttcatacctgtgggtgaatcaaactcttaatcaaccagtcagcaaaatgaccaaactcctacatcctgccagaatctggctcagggacacctgtagaagggtttgaaggcagggctaatccaatagtgtggggacagccagtagttggttgatccaggttttgcggagcttgaagcttgtaaaatttgggagactttcttttgaaaagaatatagatttacaagtacaaaatctggcttgaaaagtgaatatttgtttagaacgggaaaaaaaatcacaacaaattgctggagcctacacggaaacatatcctgattgcatcctggtttcccctcctcacttagaacactacagcactcaacaaaccctcagcacactcaggaattcatatgtgcaagagtcccaaagtttaggctctgttagcttcctaggaaagccccctctgggccaggccctacaaataagattaacaagaacaatacctgatgcttattgagaagaacttggcacccctgtatattcatatagtctttatcacaattttataaggcaaatactattattggccccactttatagagctaccagctgcagagtcactagacccactccctgaaagtagccccctcctcagttatttcttaataccacctgtcttcccagaaggcacaagccaatcacatagtgtggcagttaaaattgcaggttctagatttgcgcaaacctggattctgagcccagctctgccccttaacagctgctacacaatctctctaaacttctgcttccttagctttacaattagtacattattatttctgctttgtggctatctgcctggcccttgaaggggaatgcctgtcagatccaagaagaaatgtatgtccaaaggaggtgggagagaaaattctcttcccctatgatttcagagagccactgaaaccatgagatcccaaatatcatacagatcccaggaattccttatgtacttctaggaagcagcttaggaaataacagaatcagtttgttgcatttgcaacctatgaaatcacatggcattgaacctgtatacagcaggcgctacaagtgcaataactgtaagtctgctctgtaagctggatagagccacttcaatccaaattcaccaaagcataaacagaacaagtgaccagttttatcttgataaatttattcacagccacactcttacccggagattgcacatgattctaactgatagttcaagaaggtgggaaaagttaaaatgggagacaaaaagtaactcaaagtgttctctctcaccactgttccccagccttcactcctcatagcacacatttttgagttgcatggaaaaggagtaagaaaaaagagactagaaggacaaaagttgatgaaaatctgcaagtcaccaaggaggtatgaggaggaatacaattaaaaagtactccatatttccctttgcacgtcactgattgtgagctacaaggtacatcaatattttcagtattataagatgatggacacttcctaatctttccagatatatgacttttagtcaccctttcaaaaggcatcaaaatatgctatgtatttttttaaataaaacactttttcaaaattattgcaaaaaaatctattctttctgtaagtggaagagagttactgcttactattggtaaaagtatcctagcttattctattacttgagtttccccttattttataatttactgtaaattacatttttattattatttgggacattttgtggtattttttcccaagacacctaaggaaatttgcaatgccaccaacgtgattcctgtttagttaagcagctactgctctattgactgtctctgagatagtgacaccccctaaccactcaaacattgttctgctgtaccattaaacgaggcagaaggcataatttattggttgatcctactgagtagctgaagttgctaatatgttttttaaaaatcatataatttgtgattcgtcgtattatatacgacttaccctgggtgactggcaaattggaattttttaagaaaaggaaagttttcaagcatcagtatatgactgttttgttaaaatgcagagcaactgagtacttagttcaataatggactttttacaaaggccataacttttatattaatagctacattctgtaacagtatgtcaaaaagctgcataacagatcctttagatctattactgtccctccaaacaaaacctgttatgcacaaatgcaacatcaaacaacaatctgtagcagcccatattgcaaataatctgagcagagtcctgggggcctctttaaaggctggtcatgttttgcaattacaaacacatattcgacctatctgcagacatgtatgtgcgtgcctgggttcctcctcccttacccatacacccttgggggaatctggaaatagtttttcaaccggtttgctcacactttcaaagaagtgcttggcttctgttgtttttttgctttttatcatgaccaatagaagtggaatccaaaaatatccatcctaaccacactaatagaaagcaatcaaatatccaatcaacccccccagccctacctactatccgcctgctctctaggtaacatatgcaactcgctgtggctatgcggttaccacggagggctttccggttgcctctccccaagggtgtttcaataaccaggcacaacggggaaagcaaagagctgagtttcctacctcactctgaatctcctcgtttccacggggggttggggggcagaggggagtgttcgccaaatccttcatattatttgagcacagctcttgcaggctattttattttttctcaacgagaactttcctagatgagtaagcgtgtttgtctttaagagttgttccaggagagatcatgcatatttcagccagctccagatgaaacgagttaagcgattctccagcatgctaatgtttgaaaatgccatatttgtgccatattcagacgttttactaggaacccgacttcaaggcagtctccgagcccccagccctcttccaccccctcctactcctttatgtatatatgttgcataattatggagcagtgagtatttatcaccttttctgggcagtaggcagaaagaaatacaataccattacttccagttactgcttttcccaagataattaggtaacacagtggaggagccttggtaagcctaacgctgttcaagttaagtgattgacatggccctgtctggctgctctattaactgtttcattttgttgctatttgcagttttcttggctaatactccgaacaaatacggactgtttctttagccccttttttctctttgaccttctcctgcccattttctttgactcacttcaaactgccttgaaaaggcctgttgaatgcgcacagtccatcagaggcccaggttcgtccctacccttgccctgaatgccttacttcaaagatggcccgcattctttaattgccctttgaattaatatcaaagggtcacaatgcgagtgccaaaagagaaaggggctttaatgaagcaaagagctgccattcatttgcagataagcacgtttttatgcctgaacggtcaccatggctaaaggcttcgtgaagaggaggctggcctgtgacttacttttccttaagtagtgattagtgcaaacaaacaagagtaaacaaatttttttaaaagtctacaaacaacgacaacataaaataaataataaggctaaattctcaagctgcacatttctctcccacctttccataaaaaaaaaaaaaagtcgtacttaatcagcaaatcccttcaccatttttaataccatatttcaacatttaaattccaagggcaaagttcaacaatatgccgagataaagtattttcagtttgaaattgtgtgccatgggtagcacagagggaaaatgtgatgactttaacatagaaggaaaaaatgccaccttcacaaaaaatgtgctagtgagctcaagacataattacttttgaaatgaacatttgtgcttaaacacttaattcttttagtagaaagaatttagttcgagcctaaaatagtaaaactgtatctctctatctacacatttagataatatttttccatttcttacaaagaaatcaccatgcagtggccactgtctgcattgtccccttgcaacactgtagctgaggctatagaatgagcaaaccaacagcaccagaggtcaacacaaggtaaaatacagctcaaatcataaatgattacagagtgaaatagtaagccctgtttcccctcttcatcattctccttgcagagaggttgatgattaaagaaggatttcagtcctggtgaattatcatcttagctcaagctccgactagcatccttggtgctcagctacaaactgaaccgttggcctcctggtagacataacattcagaccattgtcagggcttctctcccctcactggatgctttggtaaacagagtttatgttaccctcaatgacgtacaagggaggtccttgttcagatgtttccatcggtctccaaaagtgagttgccaattttgcattcgtgcaataaaattgtcgctgctaagttaaaagaaagagaaaaagagagaggtttcccttatcttcagggaaatcaaaagcatcttctcctcactggccttattttccatgagcttatccatctggttcagagttgccaaaatagagtgaaaaagggcagcaaataaatgtcagagagccagccaatctgcataaatctccaactccttccagagaaactccttcctggcctgctgggccttccaatcttgtgacatgagccaacagacatcagaacaatgtgaaaatcaaaagacttattttgcccaaatccaaacccttaaaagcagtttctcccatactagtctttcactagatatgcagcggtgtgctgctttgcaataaagcaatgttatcccagtaactaggtcccttatgtcctagatatagaattagttctgtctattttagactgaccacaggaagatccacttaatccttgttaaactgcactctgagacagcaagaaggcaaatcaatcagctaccaaaccttgtttcaatgagtacaaaaggaatcaacagattctaagtaaataatactttatatttgctcaggacttctgatgtgttcgcggtcactaacacaacaatcctttgaggtagtggagcaaatattatcgcctacattgaaaaggactccagctcagaacacatagtgacttttccatgatcacaactattcagagagtgaaccaggacaaatctcttaaccccaaagcctttcataaagccatggttatatctggtgtagaactagacctgggcagcctgatgtcctatggattctttaccaaaatccgtaagtggaataaacttcaagacctctgcaaatccagctcaacaagacacaagaaaaatgtttggaacacatattgcaatgcttcctcaggatgctatggtcatgtaaatataactgtgacaagttccatcccaaacatagtaataatggtgatgctgatgatgatggtactggtgacagtaacgattatatcttgcagttgtctagggctttgcacttcctaaagtatttttacactcactatttggtgtaaccatataattctttgagttgagggaaaaacctttttttcactttaagtgtcaaggaataaggcaatgtgccttgatgccaagggaagtaaagcattttgaagtttttaaacctaaataacctagtcattgaagctacctaagtaataggtttcttatttcctatgtaattctcaataaagctgaggggtatttgatacccaagtaaaatttatattcccaagggacaaatcattcatgacagcatcctcctcctagctaccttcccattggcagtttgaaaaagatgcttctgaaattcagttccacatgaaagaagccttctaaagcttaacctgcaagctgcaaaaatgcaacaagaaaggtgttccaacttcacaaggagctgttttatcaaagaattttcctagacttaaatgaaagccttgtccagatgcctgctggacctctctcctgaaggtttcactttcttcgcgtcaccaagtcatgaccacaaagctgatcgtgttgcatgaaaccatcctaccagacaacattgacctgggatctgatgaatgtttagttcaagaaacactgcatagtagccgccactgtttatcccagttaggaatcagaggcacacttagaggaaactctcatcttcaatggaaaaaagaaaaaaagtgcagcaagccgttctgaaatgtgtagagttacaaaagttgcattagctttagttctttaaaaatgtcattataccccttctcccaagcaccagcatgtttcccaagcatggagtaagtgttatgtcaactaaagaggcttaaaggggaagaaaatgtgatctaaacaaatctctaggaacagacatcctgctgtaggcttcaatgggtaacatttgttatgaagtaataagaatttgcataattttggggaagactttgttttcaaagtaattctctttttcacctgcttaggcctttaccgtgtatggctttggttaagttttgttgatggaggctcatgtttaaccaactgtttttaatttacaaattaaacttgtcagaagtagaaatccttcccttggaactcttccaatatgtcaagaattaattctaatgaaaacggcattgcctaaatgcgggatggccagtcacttattttatttacacaaagtccttctcagtttctttgataaaagcagctaaatctttttcctctttcatgttttgtcagcacttgattccttttgtcccttggctatttgcctagctgtggacaataaggcaggaagaatagaagcagattgttggaatggccctcaataaacctaattatgacatgttgactgccctcaccatgacacagtcaggggacccaggcttattcaattacccttgccaggtttctctttcagacctaaagttatcctttgactgtttgtatttctgaaccgtattcatgttcattgtgaaagaaaatcccctggactttgaggggtttttaagttgatgctgttattgtagctaatttttattaactgaatgataacatgataaagaaatagacttttgttatgtaataagaacaaatcagtgtgtgcttaaagttacacctttctttcctttctcttccagccagcctggcaggacatgtaacctgaattaataaacaaaataatttcttcaaccagcatgttccttacaacatgatactgaatctagcagtatggaacagggttgtggcttcattgtgactcttcttaactaaaaaaatataaccacatgattttcgggcttgtgtgtgtgtgcacacgcctgtgtgtccatgtgtgtttaaacaccaagaaggttctttgctctattaacacgaggaaacataagttcattggtacctttatgccaacagctatttcttctactgtttaaggtagacaggatgggcagtattttattaaacctctggctgcttgttggaaggaccctttcctcctcaaacagattgttcggagatcatgccagtggttcctgcaaagccaatgtataaaagctgtgtgtcaagtgaacaaaagagtggaaaaatgaaggaatgccaaaaatcagctcctgatccatcctagcttttaagtcaactaggtctgaaagaattaatattcaattgtatttaaagctgcacaaagcttagcagaaatgattgttatttagttgcagcatttttggatcatttccctttctttttcctttttttttcctattgagaaactcattgcttcctttaggtaatttgacagctcttagaactataatcaaataaaaattcgactaaaacatggcaaattcggtgctgtaattttttaaatttgctcctcaattcattctcttcattagaaaatggccatcttttgaataaaagcaggtataaattgtaatctgttctgcaagtaaattcggagtttggtacttatttggttcctagaaaaattagtgttttaatcctaatgtgagaaattcactttacaaaggacttgtgaaataaaatatacagaatccttaatatgctctctccactgtgctctgttctgcagctccctctcctctcaaatgcaacaatttcattttctccaaattctaaaaggatatttttaatctcaaacatccaaaatgaattgtacaacagagtctctaagccctgttatacattattaatataagtaattttgacaaactatatatttgtcttcttttgtagaagtcattctatagtttcattttagcatttgttgatttcagttcccttaaggagtataaatttatatttatattaatattaaaatccctctgaccaactataaaaataatcatcttcgtactttaaattttttaaaatctcttttaatagagaatggaaaatagtaaatgtctcaacgctgtagagttaacgttcttcctaaatgttcaaattattttaaccagcaaacgtaaccacctctataaaggaagttttttgtttttttttttaaagtctgcttttgctactttagagtggaaatgtttttaaaatatccaagatgtctcaatattttaacttgaagcatatgtattttcgcattccctaaaatgttttaatgtttttatatagttaaacagaataacaactcttcttcgaacctcaactagcacttccctaagaaaacatggaaaaaaaataagtagaggaaatcaatactcagatggagtactgctcaccaccccaagcttggcaaagcatcatgaatgcctgccattttaaaagctatacagttatcttgctattcaaagtatattaaacaaattcacgccatatctctcataaattcaactttttcaaacctgctaggacccaattcatgtggcagaatcagtcagttttgtctgtggatatggaaaagggagtcaataatttgaactgttttgatttgtatggaattactcaacaaaaatcctaatgttagctagaagtgaagtggctaagatcagatttcttctttaatctaaaggtcaagtagtgactttctctcttattaaataaaaattttaatttcgattcaaagttcaaaattgcaatatatttgatctgagtacaggataatcactaagaaaaatagagacaaactcatatggtaaatagcagggcttattattctgaatatacaaagggtatagttcttcttcctaacattctcgttttataatgtttggcttctattttaaaagattagtaaatattttatggcaatatttgcttacatgtgtttccacaaacctatttaagataaactacaataaagcttgagccatagatatcaggtatatacaaaaaattatgcatgcaaatattagtttggatattttatatgctctaaaattgtctagaacaaaaaaaaaacccaccacattttcaaagtgcattttacgttgttaattttaccattcagtctttgcaattaaaaagtgtaatatttgaatgaatcattgtctaccttcagaatatatagctgaaaagtcaatatgttgtgtagatgatttttgaaataattttcctccacaaaaataaaatagtaaaaaaatgggaggatgaaacttagtaaaatctcctcttgataggctatgacattttgctttggattgtcttcaatataacaaaaaaaatatttcttacattctttccaagtttttaaatacttcaatgtttttacaaaaacaacaaaagttttcagatttgaaatgctctcctgtttaatcttcatgagttttctctgaaactctgtttggcattgaaaattttgatttattcaaataagatttttaaatatgtgagtgtatatgtgtgtgttttagttaagagcaaactcttgtttgccccaatcagttgggacaaccgctaagtgtgagccattagggcgttaatttaagatatgacttagaatcatctgaagtgaattcactattgtctgagtctccttctcttcaagaccagacagcttctagctttgtggtcagtagccagaaatcctgtgtgtccctttctggacacaggaagaaatcgtccaggcatagacgaaagagggaatgtcaccctcctgtgtagcaattctaacttcccggcagaatcatgtgcaacccattgaaagtgaagctctcaaaacaatacccagaggcctttccagcctcttctggaagccacagctttgacaagaggtacaagaaagcacgcatctccctgcgtggaagaagagccggtgtgttcacctgtgatactgcacagaaatgcttcttcccagaaggcttcatttcccacctccttccagcacctaaaggcatcttttccctcaaagacaaggcaaggtagcagttgctcaccttctaagatatgaagggtcccggtcctctccatccttgccctgattccctggctgcctgggggccccatgatttcctcaagcggctgcctgtaccttctacaagtctgctgagaggtggatggggccacagctgccacagcctgctagagctgggagagaccgtggccttcacctcgcccagagcttccatttgtcagaggaggggagaatgaggtccagaaacggaaagcaaccaggtcccagtaatagtttcagagacctacaagaaacatctagaaagtgcctaacacaacctttacagctaagggaactaagcctccctgcatcctccaattaagggttttgcccacctgcccttatgcagtgagtggatatttctcatcttcttgtgaggagtcggtccaagatcccccctaaggggctccctacaaagacagaggatgctgtgtagagtaagaaccatatgggtaaattgttagtcaaacccagactttgacttcttgaagcaaacaagataaggcacaggaaatgaagaagcaccctgcgtattctaaagtgcaagacacaagttggcactgttagtatgtggctgttacatggttgtgctgactcacactttacacacagaagcgtaccatctctccccacctctgctgaacaaggacaagggtagatgcggttttgtgggacctgaagcttttacaatttagggggctcctcttgaaaaaaaaatacaatagatcttaattttgcaatatttacaaaaatctaatgacacagagatgtttttaggtgatctgtcatggatccactagctgtggctgggggttggggaggcttctggccagggagggccagaggcttaaatctccagagactcctagactctcagtcttgagactcttgagatcctcagaaacaaatcacagaaacaaacctcaaaggtgagattcccataggttcattagctccttgctgaacccaccttttacaggaacccctcctggggagacgtggaccgtttttctagacgctcatactccctgtcattatctaatatttataaaacacaaatcaagcctgagtgcccactttgacagtccaataggaacacaagatcatttaaatcaagcttgttcaacccgtggctcacgggccatatgcagccctggatgcttttgaaaacagcccaaagcaaattcataaactttcttaaaacatgagttttggccggtcgcagtggctcacacctgtaaccccagcactttgggaggctgaggcaggcggatcacgaggtcaagagaccgagaccagcctggccaacatggtgaaaccccgtctctaccaaaaatagaaaaattagcctggcatagtggcacgtgcctgtagtcccagctactcgggaggctgaggcaggagaatcgcttgaacccagaaggcggaggctgcagtgagctgagatcatgccactgcactccagcctggcaacagagcgagactccatctcaaaaaaaaaaaaaaaaaattgagtttttgtgtgatttctttttttttttttagctcatcagctatcgtgttagtgttagtgtattttatgtgtgaccgaagacaattagtcttcttccagtgtggcccaaggagcccaaaagattagacaccctgattaaaatggtccatgaatacactggcaatttctgaatcccagatatcattggtggactcaatcccagttgttccactgagacccttttggcttacatgctccaaagtgatttgtttctaaggatctcaagagtctgaagactgagagtctaggaatctctggagatttaagcctctggccctccctggccagaagcctcccccacccccagccacagctagtagatccataacagacatcctttgtgccccagtcctctagaggaggggagtctcatttcttcagacctctgacaactgtccaggagccactaaggatttaagagctcagcccagacttctgctccttggggaaggttgtgagttctaaggtgagatgagccccacagttccttcctagtctatggctcttggccaaagagacccttcttgtccttctgctttttgccagggagcccaagggacaaaagccaaggcccttccctggcactgaggaagtgtgggaaatccacttgtggtggagggatgctcttggtccaacctggctatgtctcctcctagacagctcaatggggaattgtgccctagcaggtcctgcccaccagcaaggagctccttcatagcaaaactaatcctgtcctttcacagtgaagacaggatctgctgaggtgtgattttaggggcatcaggaacctatctcctgcccccaccaaacacggacacctgaaattctacctttagggattcattccttcatggtaagttgtcagctctcagcgtcctttagaaaagagcaaatactttccatttaaccagttaaaggcttaaccagttgagtttcttttgtttttgttgttgttgttgcttgtctgtttgtttttgagatggagtctcactctgttgcccaggctggagtgcagtggtgcgatcttggctcactgcaacctctgcttcccaggttcaaacaattctcctgcctcagcttcccaagtagctgggactacaggcacctgccaccaagcctggctaatttttgtatttttagtagagacggggcggtttcaccgtgctggctaggctggtctcgacctcctgatctcaagtgatccgaccgcctgggcctcccaaagtgctgggattacaggcatgagccaccacgcccagccaaccagttgagtatctatgtgaatgaggtagagctgagtgcaagcctgtgcgtgtgtgtgtgtgtgtgtgtgtgtgtggtgtagtagtaatagtagtaggaatgtacaaggcaaatggcagggacagggattcaggaaaggagagggaacagcacccaagactgacttcactcttttcacctaaggtcagcccacagggccctttatggaaggaaagtggggaaaaacattttcaaagggtttggtagaggagggttaggtggtaggagaattttcaagtatgcctgtgaaaagcctacacttgttctggtaacatcttttcctataaattgtagtctgagtgacagttctttttatttttcctgaagtttttccataagaattttccaagcaccagaaatttcaatgtgaaagatagtcattgtcttacttaatgaatttaacttgggttttcatgttacaaaaaaatagaaaagatacatttcaggggaaaaaatgttagtttaaactagtaacattaaattatagtaattcaataaaattatgaaagttagccaacaaagattcagaaaaaaaattggctctctgtgtcatttgtattttataataaagaaatggttggtctccttatctgaccaaggtatatactggcaccccattagaaatagagtccaaggccagacatggtggctcacacctgtaatcccagcattttgggaggctgaggtgggtggatcacctgatgtcaggagtttgagcccagcctggccaacatggtaaaaccccatctctactaaaaatacaaaaattagccagacgaggtggtgcgcgcctgtaatcccagctactcaggaggctgagacaggagaattgcttgaacgtgggaggtggaggttgcaatgagctgagattgtgctgttgcactgcagcctgggcaacaagagtgaaactctgtcaggaagaaagaaagaaagagagagagggagaaagaaagaaagagaaagaaaaggaaagaaagaaagaaggagagaaagagagagagagagggagggaaggagggaggagggggaggggaggggagggaggaaggaaagaaaaagaaagaaagagagaaataaaggggaaggaaggaaggaaggaaaaagaaagaaagaaagaaaaaagaaagaaagaaaggaaggaaggaaggaagaaagaaagagtcctgtgcaatggtttagtttcaattttcctaaaaaggacaaataatataagacaaaggtatgccgggaaatgagtgagtacttgctttgacctccacaagagttgtatttccctactttttactgacaactcattgagcctcttacaaaagcaagatgagatggtcatcccacttatccattggttttatgctcaggaatgccccaagaaagaccagctgatactttccatagacaaggagaagacccagaggagccaaggccctaaaagtttactgagaagcccagaaactgaatccaaagtagaacaggccttgagttcccatcctggcctcctacttggagcgaattgcctgtataatggggacttgcccagtacccaggcattcctctaacccctgcactcttaagcctggctctttgtagtttctgacatgatgctaaatccccagtcttccattcgacttctgctctcagacaaaaattcagcaagtatttagagcttggcagggccagtgaccacaaacagacactggcttctagtaagaaactgtaaaagttgcctttctgttgccctctgataaatgtgtgtcatgtacacacgtgccccagatgtgccctgtctgcataaaagccaagcacatctaccacctggaaagtttccacgctggatcaattcccaaatgatattctgctctggcatactgctagtccaccgggggcaccatgaggaaaccaccatttatttgctcaacttgaaattgactttcagctttctttagaaatggtctcagagggtgttttagatgacccagaacttcccaaaatgtaactaacaattccagatcccatctacttgggaatcacgaaacggaaaattaaaacattttccccagatgaatttatgttccacttcctatttttaaaaacttacacgtttataaatcagaagcaaaggggctgctctccccagaaaacacctgctctctgacattaagcctggaggtttaagttccctggaggatggctctgcctgccacttcccttcacctgtatagataaaagcagtctgatgatctgtcagtaacctaaagcttggccactatgggcctagaagcaaattattttatatggtctaaatgtttgttgagaacatcacagcaacttgaggagcaaatgaaaattttccatgttgatattaatcctctgtagactttccttcctgtgtggagagctgcatacttttacaggtagtaatcagatgccacaaactatgagcctgattcaacccaaattatgcagagcagggaatttttgaaaagctgcttttgatttttcttagctctttgtagacactcttaatgcaggcctgtttccatcccctgactgacccctttagatttccataggcaagtcagagagaaggcaagaagggaattgagggcaccttgctagccatcttccatctaagcacaaacgaaagttctagaattaagaaaatgcatcctcctgccttactggcacactacatcctgcacattccgggcctggcagcaagaacagtcaagaaagaagacgtgtttttggttttttcttatttttttaaaaccaaatcaagattttgatttccagaaataaatccttcgcccctaacttgttctcctatttctgaaaggcccattcctaagaagaaatgacttgaaagatttgctctataatattcgctggcaatcatagctccagttttctcgggagggttttgagggggttgtatttctcgtatacttggagcagagtcctttctggctcatttcacaggctgaaacgtctagcttaggtagaccaggtattcagcaggacaacaactgaattccatagcatcagatttaagggaaaatagactgaaatgatttggtggaagcaaggtttttgaaaaaaacataaaaagtcttttgtgcagagatgggcatggatatatactctctaaaaatttacaaattaaaagtcagccattcccaaactcaagaaacccctagagcatccggcagcacttctgaaaaataaatacaagaccatattttcttatacataaaccactctcttactagttcaaccctaatttggtgaccttggagacaatttttcttttgtaagtaaataattataataagttgcctctaagttgttataaaactacccacaatttttctggcttacaaagaaaaataaaaatgcttaacataaagagactacttttgatcgtgccaaacttaaataaatagtaaatagggaaaaagtagaatttttaaaaaggaaccaataagtcaaagaaaaaagttttccttgtatttagagactgttccatttgaagaagcaatagaatattggaggaatgtccagaaggtagtcattgttagcagaacaactctaagcagtaattttgaaacctatgttcctactcagatatagggataggagaaaacgtatcatttttcttgtgccagtgcccaaaggcaaacacactcctgcaccatgatttctaagaacttccccaccatttggtctcaatgcagaagctaaattccaccaaagctaccagaattacaaatgtcattccttttgtccttaccagggaggaattattttacaaataaactcacacgtgtgccaaatggtgctgtcagattgaaaacaatctacatgttgttaaataagtcatcctttgccagtatgatggagtactatgcagctatacaaacaagacattatgcagaataattcctgagatatattctaaagtggacaaaaaaatcaaggtgcagaaaagtttatattgtaggtagggtaccatttctgccaaagggggaagataatatttttaaaaagagagagaaatgtaattacttggttggcatagagtgtctggaaaaatggtcaagatactggccactagcagacagaggtgggaggaaaactagtcaccgtacatccatttatatcttctgaattttgtgcaaagtgagtgttttacccagtcaaaaataaatacgataatttttttttaatctgacaaagtatatatttcacttgagtgtttgggtcaacaagagtgcaatcttcagaataaaagaacatttccctttggtggctgagagttggcccccataatccaggagtcttcttgcatctaaaagccttcagggggccaggactgtccagaaggaaggccccatggctcaccagcgaatttttatcagttcactgggggcccggctggccaaggagcttcggctgcctgctgcgaagcctaagccgcaacagctgcataaactggctgtgccccagcctgacctattttggagacaggtcagaccagtgcatgcggggataagaaaacaaccttccttgcagccagtggctgcactgccaagctgcgccagagggagaaacatgggggcaggagctctccagctcctaggagccttactagccaggctattttctttttcactctcacactgcaccccaataacacaggagcccccaacgttttgggaagtaatggaggcaaatggaacagaacggtcattaaaatgtatccttcagcttgaagaatgctactttggaaggtgtccttaaaacttcttagctccagttttaaaggagagggaattaagaagaatcatgcacaaagaaaaaagaatgcacacaacctcacgtgcagagctataaagacctttaagaacaatgaagcaggctgaagaggggatataatgagaaactgtgcaaaaacaattccccaaaatgaaagactataacagcattttaggaataagaatggatgtatgagactcgttttcaaaaaagcaacgtatttgtcaattcctgatctgctgaaaaaacttgtgccaaatacaaagaaaagtttgagttggagtttcaaaaaaagccaagttaatctaaaagagaaaagtaaccttttaagctgggaggaaaagtaattaagaagcatgttttgacatctcagctaatggttttagaattttattttttatacccattaaatcgaagttttttacatttaatagttgctcataaactcaattttttgacttggtgaaagcagacttagtggtgtggggtgtgtgtctgtgtgcgtgtgtgtgtgtgtgtgtgtgtgtgtgtgtttggtcttcattgttgcttctaagccctgaattaggctttatctgcccttgggcagagcccatctgctagtttgtaggctggtcactttctgagtgttcagagattatttcccccccgaccaagacttttgagttttgctgctaggtgtaatttgcacataatatgcaccttctcatttcattctcacagaatcctggaaagctggtatgcagttccctatcttagagatgtcaaaactgaagttcaaaaggtcacaactaaaatgtgcttggtctcaattttagagcaaaattggtgatgcaagaacagaccactttcaccttgggtactgtgttttttataaggcaagaaagatctgaaaaggtactttggagtgtgtttaaatcaaacaagacaaaaagcattcaattgctttagtgaacctcaattgggaaactggccaagtggggattcataaagaagaaacctattgcttttcttataataaaatgaattggaccaattaattttctttagttcaggttaagctcaaccgtgttgattgagacacacacatgcacacatgctttggccaagattttcttaatcatcacattacatttgaatattggaagaatttaaatatatgtttgaagacagattctatgaatctataatcgtttaaaaataaaatgcttttgaaagaaagaggtagtatgaaggaaactaggaagttagtactcaaaggcaagggccaatgaactgggtaagaaccaagagcctgtgaactgggtaagttatgccgacactagagtttgccactaaaagggtagggggcgaagagggatatgtttaaaagtcattttcattttctgtatatatgcacatttagcatatctgtgtgcctgtaaaaatcacaaaataaaaatgtagactttctatttaaaatgcaaatgtgtatgtgaccgtatcagcattgactatgagagtacacaataattccatgttgcaatacaaatttcatagcaattaacttttctttcttaatattctaccctaacttacttattatttccaaccattaacacaagaccaaatacatttaattctacagttgtttccataaatatgcctacttttcaattataaaaattttgaaaatctacatttaagttttgataaaactatactacttaaattatccatatgatcctgtaaatttttaaatgctgaaaatcagtggtatttcctctccctcaattctatgttggtcaaccaagaaaagtctcccatccctgtcacaaagcattttgatcagctatttttttttcctgaaacggagtctcgctctgtcatccaggctgaagtgcagtagcacgatctcggctcactgcaacctccgtctcccaggtttgagcaattctcctgcctcagtcccccaagtagctggggttacaggcgtgtgccatcacacccagctaatttttatatttttagtagagacaaggtttcatcatgttggccaggctggtctcaaactcctaacctcaggtgatccacctccctcggcctcccaaagtgctgggattacaggcgtgagccaccgcgccaggcggcttgatcagctatttttaaacagaatatgttggattaggtccaagatgcgtggggaattggcttccagaattcagttgatattcacatactattacagatacagtaaatatggccaaataaaagtacataagaaagtatagtcaaggaattactgaatgagtttaaggagccaaacacacagccagtttaatagttgcctatcttgagttctaatctgttttgctagggaaggtaatttatcaatcacctcagtaagaggtggacataaaaactcagactacttcaatcaacttactttaccacaaagtggaggtgttttgttttgttttgtttcacttaaaaaatcctgcagcaaaatgtaaaatggtgcgaactttgctgtatgcaacgtgcaaggcaaaatcctttctcaagattttcctttcccctagaagaaatgtgcatcaaatcaaattcttaacactgttgcccttatttaatacaatttcattttcaaagacacatggccacttcaacaacagaaattacctgttggtggtttttaaaaagatttgtcaggaaggaaagaaggaaaagaagaagataagaatttataacacctattattcctcaacagtcttcaataactatatttcatgattttcatatctccctttgacaatggtgaactttctaattcttctctcgtgaattgatgttttatgatgttaaacaggcattttgataactgtgcatattccaactaaaacttggaaatatacatattctcttcattttggagcatgatctcagcttagataatttgaagaaagccttcctaaaggagaggtgttctgcttccagtaaaagctcacaatgctattggagctcagtatttcccaacactgtagggtagagctaaaagctgagttgtgtcttgctctaccgaagactggtgtgaatgggacaaaactatctttcccaacagggcagaggatggccattaggggattagtcttttcaataacctttattaggaaggaaagaaagaaaataggtattgaaggtaagaatttataacaccttttattcacctattatagaattataatacctattgctgctttggtgtttatcttccagaaagatgacaatacctgaattttcttcagaaatgtctgaaattccttttcacaattccccaactaaaggcagccggttcttgggtcagcaattttgagttggtactaagatcaggcccaacttggagctggaagatgctgtccctggggcagtgtgtgaatacacggcctaatatccaaggaagaaaagttacttgaactctgtatgtatacaaaatatacatttgaaatatatgacaaagaactatctaatgctatatctagacccaggacatgggaaccataacaaatctgagctaactgtaacttctagcttaatctatttcaggcagttgttctacactgcaatgtttggtagtaaatattttacatcagagagcatttgagcacagatggattattaattaataggaggattataatagaaaatattagataatacccaccaaaattctgctctgtatgtcaagattcatcttgctcaagagtgaacaagagtaaaaaataaaacaataaagcctcatgcacaactttttagtactgaaatgagcacaaagaaagagattcgaaaaccccacacacaggcagatccatgatgcacagttacatatccaaagcctaaatctggcatgaattttacaacctcagttagtgctatttgttggaatttgcaaattaagcacagagatagtatttccaaaagattcgtttgcaggatttttgctttcataataaaagaaaaacctatgcaaatatattgtgttcttaaacaaacaaacaaaagtcggatagttcatctcaaaatcaacagtttaaaagagtcataaaatgattcaaggaaatatttctcctggcattcaacaactgggaggctgtgctgttacctcagtttctgatgactttagaaagtgcaatccataggacaaacatatcttcattttgtgcaactaaatatagtttagtgccagcataattcttagtgtaataaataaactctaacaatgcacatacatacacataaacacatatctattcctaaattatagaggattggaaatatacatgagagtcatctaaccatctataaacacagaaattatggaaacacgtgtagagagatgtagtcaatataacactcagattcctgtgtatttaattattccctacctacttttacataaaaatctgctatgttttcattaaataattccagcttggaagacaattttagggaaacttttgtatttagaaacttagcaacaggcagatagtagctgccatgctttctgccacacccccccaaaatgagaatctatttgatgataaattcaccatcatagcctcagttctaagtaagaaatcacgataggataattaaaaacaccccatgagtcttctctacaaacctacaacatgtaactggtttcagttcctatttcttaaagagaatttggtcaattcctccttagagatttcagaggaaaagaaggattttccaggacagataaattgaaatgatcccgctttgatctctatggttaagaacccctcacaatggaagatgaccactgaggggccgcgctcccggccttttaatgtgtaacaatggtatcaacaaacagctacttaatcaatatttggccagagctgctgaaaacttccttttcagattttaattcctacttgtaaaacaaccccagagcagccagtgagataagacattaaactgactgcttaattgccttttagtgtcttgttagttatatatgtacattctaaatggttctttaatctttatttaccctcatagataagttacctgtcatacagaatccaatcgaacgtaaaacattttctgttccagcccaagccaaactctcatttctcaccgtttgtttgttgttactgttgcagcttttcattttcattggccatctacttatgtacaacttaaacatttagtctcataggaagaattttttgttgttgttctcaaaatatatgcattcatggatgctgaagccattcggatttagcggccacactcctattcacgtgatcgatttctgcatattccactcgcctgaaccgccgcgcgctgactggttccgcctcaccgcccgggtgggttttattgctcagccctggggacttttaaatgacccttcagtaattattactcagtagaagcccctacgtcctggttccggtgctatcaacaatcaaatcaaaccccaaaataaacatacgatttcaagcattaattagaaaatctgcatgttttcaataaagctctagaaggtaagcacacagcagtcaaccaaaccaaacaagcgaaaaagaaaaagctaggagctgaactctggtgtttcctttcaaatcgttccagcaggaaaattgttaccgcgacattaataaatagaacacggcgtggtgttctaatagaattcaagttctgatacttccaatattttttaaatggatgatatttctttgctgagttttgcaaggacttcagaaaatatgaagttttctctatagaatcgaaacgacattgaagtcaaattcgtgatcctaacaaatggacttggaaagtgggctggtctgtccacttgaataaaggatccgatgccataaacctatgatcttatacccaatgattttaatctatgggaaagttcgtcccccgccttcccctcctcccaaccttggaccaaaatggcccttcctgctcactaaccgggaaagaaacggcccttcgttttccttgatttcagcagtcccttaatgataagagtgctcttttcatgatttcactggaaataaaatactccaaatacctttaatgcttttctgcgttttaaactgattaatcttctcctacctcccccccaaaaagctgaagtcgtcctcgttaactttacaaaagctgacaagcttacaaataaaatggaaacttgagcaaagctttcgtcacttttactttctccaattttttaagaaagcactcttttttgtaaacgtcaaataagagggaacagataggaaaggaatataagcccccaacagacctatgcttgagatctcttagtgggatcttttaaattgttgcaaacctcccacgctcacttgtgattttaaaagggaggaaagtcttatgagagtgtatcgccagtccccaatcaaaacatcaatttggcaatctggcctctctccccctgcgctccggagctgccacttcaaagctgctacaacaagtcagtaattgtaactttgcatctaaatatttaagcgagagtcttgcagtcgcgtgtccatttacagtcctcaactgtcctctaattccattactgcacaaagcaaaaatgtttcccaaaactcacaaacaggaaaagcgtcaccctgctggagggggagaaggaggggtggaggaggaggaggagatgatgaaggggcagtttctattgattagtcaccgcttttgtgttaagggctttctttaaaataagaaaaaaatggggggaggttgcagaaatttcactaatgtgagcctcaggcaagggaggaaaaaaaaaaagaggagaagaaggggggaggcgggctgtgtctagatgaaagtgagaaggacataaaggaggcaattgagtcggctgcagcccggcgagctaagcttcgagccggccagagagtaggggagggggcggagcggcgcggcgctttggcgcagagcacaggagtgggggcccagcccattgtggcggcgcccgcgggcccgctaggccgagccgggggaggaacagaggcgcccattgagcggccgctgcgcagggcggtgcccacagccccggatgcctcggccaggacttggctcccccggctgcctctgctccagtctcagcgcgggccaggggctagggggattggggatagcgggcggggttcgtgttagtgaaccgcccagccctctcctttctcctgggctatggagctggagggatgtatccagcaagggtgcatcatgcttagcgcgcgcccgttagggagcgcgggcctgagcgcaccagcaccgctagcggctcagctcttgaattgagcgagggaaaagggaaagttgggaaagttaagaggaccatctgggagaaagccactggagagaagaatgaggtgattctgacctcattcaaagtggctcaacccttttgtcctagtgtctgccaagcagacctcaggccaaagattcccctgaaaagccaggctcagcagcacccaccagacccactaactggaaaagggcaagaatacaccacactggtcaggggaccccaaagttcctcctccctcagctttcttctccccctctgccagggcgctaagaacgctttatcaacattcattctattttacaagcgggcagcctgggatttttgatgcccgaacaacagaaaggagtttttgaagtttctagacttcaaactgcacctcactctgtcctttctctgggcccctcttgtcctccgaggctcatctaaaaaggagctagagatgctgaagagacagacactgcatcttccttgacaaccccaaattaaatcaggcttcagcctccaaggtgtgtgtgtgtgtgtgtgtgtgtgtgtgtgtgtgtgtgtgtgtgtgtgtgtttccaacagcacagcccccactggggagaatactctgattttaaaaatgtagcaattgcccttgaatagcagccggcccagctagacagcccaaaagactagaaacattttgtaggtgaaatggccactttttccacgctgaagagtccataaaacttcccggcgcagcagctattggggctcattgaataattcatccctcattgcaagcccataatgtctattctcagccttttgtggtgctgttttctcttcttttctccttgaattataaaaaggttgccttcctttgttcacatcaagctgctccgagctggagctttgtctgggctgagctaaagtgtgagtttcaatggactctccaggctttgtctcccaagttcatctccaagtgtagattgtgtagagaaggacttctttgtaaaagctggaaaagttgtacaaatgtttgaccagctcatttgggacgttttgtctcctgggcctcagtcgcctgtactgcgagagagcagccagtctgccagcgccggagcctccagcaacaagtagcaaagccgtgagtccccagcctctgtgactgctctgggctcttctccccactgcccacaggagcacatttggtttggggttgtctgactccctgccttcctcccttctcagcacctctattctgcagctaggcctgggataaaagccaaggtgtcttctcagagaccaaggcagaaaaatgcacctctccaaaaagaggatttaggctgagtccataggaggcctctgtcataaagcaaaggaagcatctccctgcccaacctgctgtggtttgacatgtctttgatttcttgtgtgcatcagagtatctacacttgtttttccctcaaatcagccatttggatctgtaacttccaaatctaaatgttccttccaggttgtgtgcagattttgcattgctttgtaaagcagctgctcaggagagccactggctgccacagagttgggcaatgaagataaaagaagtcccacttggatgccactctggtaagggctcggacccagctagtcacagtcggcaacggctgtgagcccacctggaaagccgcctgtccctctggcaactccaaaactaactttgcccaatgaactccaagtcccaggtgaggaaacttcaggcatgagtgggacccctggccactcttgaccatttgtgcatttgaagaggggcaaccacccccaaggccaaagccactgagacacaatcctcccctcccccctgccgtctcctgctgcaatgatcctttcctggttcagcatttcttttcctttctttctttctttttgcgtttgtacccttaaagtttgaggatggcttgcggcaggtgaaggggaagcaagctgcacttctgtctcccatgggggagattttttttcttagtgccgacagtgcacagccgaaaaggaatggggatctgtacccctagaagacagagggtgccagcactctaagaacccagatcccttcaatttgtaacccagagcttgggttcctttcaattcccaggcacacacaggttaaaccccctcacatttgaaaatcaacttcaaacaaatcaaaccagtcaacacacagacatatttataaggcagccaatgtgggggcaattttggagggccgttgcccaaaagagtactctctctctctctcctttaatgcgaggaaactccggagaccagggcctttcctgagggcataaaagctacttcaacttctgaagattcaagtaccctctatccccggccctacaattgctcagagatgcccagtctcatacatttaatggcaacagagtgagagcttcccctgccccctacaacagagcacaattcacagttctagaatcccaggggctgaaagtggttaagaaagaaagatttacaaaacagaaaaactaagcagaatagaaatgtttgttttgattcctagtgtccctctggtctttcagttccatgtcgttactcaggcgcagagacaccgcgcatgaagggaccttgatccgagctgggcttggctgccgtcagatcaccaatgtcagctagccgatgccctccaagtcacccagcaagtgcgccgcccaaggcgccaccgcttacctcgctcgctcaggatgccgtcgatgctgtgtttggccttcttctcgctttcctctgcctccttcctctccaagtcggcctcctcctcttcacctttcccgaatttacttctcaggatgcggctgatggaactcactgggggcgggaggaggaaggaagcaagggagcgcacatggttgagacaagcagggctgtgcgggaaggaccccccacccccaaacaccagccagggccctagagccgctgccctgcactgctcgcgggtgtctcctcctgcatctctggacatcctcatccttctccagccctctcatcctgccactcaaacccccctccctattatctgtatctcggtactgaaagacggaggctgggaaaaccgtgcctccaagttagggccggatgccatctttgtccctcgattctgggcaggaagcatttcccttcctggactccgaagaccgggctctaggtctgcaatctaagagaattctcccaccagcccaccgggtaccctccttcctccccacctgaatgcatggatcctgcggttcgccttaagggaggaagaaccaaagccgacttgtccgcgcccccccccacccccccgtaaatcaagtttcttttttttcctttcttcccttttttttttttttttaaggctataaagggtttaaatttcaactgcagaatcgtttcctattgtaaaaatcaaaagaaaatgcactctctcccacttattttttccagattccagtctggtaaacaaatccatgctctgaaatatgtttctcacagagggaaaaagggagtttccttttaattaaaaacaaaccctcccgtgcgccctctcgctggccccgtgcttgcccctcttctccctccgcctcccccaggctgccgtggcggggggctccggaccgtccctgagactctcggaggaaatcggggccgttgtggaagcctccacggctttgcgcacacggcaaagtccctcccggcgcgggccccatctcccttcggttggggttaccaaaacatttgtttctctttaaaagggaacatcaatattaataaacgctctgcctccgcctcacgtttcctgccctgcctcctcgacagaaatcttctttggggcgtcctcagcggtggtctcgccaccctccgtccccaggacaagcagctcacccctccctccataaagtgccaagaacaccgggttggcaaatattgcagggcctcgggagaggccacctcccaatagctgagatcgataattggggtgattacgtctgggtcgacgtgccggggtaatagcgactgactgtcgcgcctcggggagaggttaatgggcctagtacctgacggcacggtgtttcgatcacagaccgcgtccttgagtaatttgtctcggatttcccagctgaacatgcccgggttctctcttttgtattcctcaattttcttctccacgtcaggcgttgtcacctgctttaagagaacaggcgggcaggcgttggtacccggtaccctgggccaggtggcggcggccccaccgcctctgggcctgtcgggatgctcctcgctgaatcctctgggacggtccccctttgtgagcaaaaagacctgaactctctgaggcactttagaaaggggcagaccagaacacatcccatcccatcccggagcagcctgggaagcctctaacttccccagacaagccccagacaaccgggataaattcagaagaattataacatcttgatgggggtagggtggggttatactttctcatccctggaaataaggcaactgcttacacagaaccaacatgaaaacgaaactaaaaaagcgatgtttgaaaaaggagctgaaaaatcaagttaaatctgcaacttgtgcttttccaaagggatatttatgctaaagtgaagactgaaatgtaaaggtatgtatttgggtttttaaaacttcgagtcgataacaaatattaattaagagagactgactcttctctctacccccaatatatattttttaaaaagaagaagaaggttccaaagattcttagaaaggctgtgaaagtgtttcagtaggtgggaaggaagaggagggtgtttggaggtcttcggtttaccataaccctcttgattttgcccggtggcaactagaagaaaagacagaccttgtgtaattccctcccactcagccctagctggtgtgactctttctttttaaaaacagaaccaaaaataatttaaggatagcaccaaactgcttatttttttttaatggagtcattggcttattacaaagaaaactgatcaccctagtatttgactcattgaaaacaatttgcactgggggagactgagggcggggtttgggagacaaaccattataaaacctaaagaagttccttacattcgttttggaaaggacggtgccatgggtgggagccgggaagacacttagggaagaaatcggcaacaggtgggcacatagagcttgcctgctttaggtgtttatccattaaaataatttgatgaggattgcaaggcttatgggctttaaaaaacagatgttatttttcctttgcaaaaaggcaagagctttccctaagtgttcatcaagaagtgtccagggcgcgtgcacacgtacacacacacacgcgcgcctttacgcaccttcacaaacctcagaaataactcattggagagccccagatgtcagccgttaccccccgcccggtcttccccaacacaggggaccacagtctgggagccaggagggcaaggcccgcccgctcaccttgggcttgctgccgccgatggcaccaggacgtatggagccagtctcctggtacctgcacaggatcttggagacgcagccgtgggacacgcgcagctggcgcgagatgacgcagggccggatgccgtggtgggccatctccacgatcttgtggcggatgtggttgggcagcggcctgccgttgataaaaacaccgccgagctggttgacgcggccctggccgaggggagtggacactgtgggaaggtgaaaaagagaagcaagggaaaagtcactggaggaaaataaaaagcaaagaacagcagcacgtaatttcgcagtcttctgtcctatcctcatgttacagcaccgacgctgaaactgctcgacatcggactcccagacccagacctcctttcaatcacatttgttcaaattattcagcaatatagcgcatgtaatcttgtgtaaagacagcaaatggggcaaaataattctccccagagaaagcgtcttccccttcgggcccggggagtggcaacttaggagaccctgcagctggtagagagtctagcttgctctagaaacagcctcctggcgaagagaagttcacccaggagctggccttgatgaactctgctcccaccgatccctgtccaattgggatctctccctttctaagggacttgggccagctgatagcccttggggtttctagccaaaagtgcagcagccaagggtcaaagagggtccagaaaggaggcccaagcagcagtgcctgtgtcacctgttacatcttgggacagagaccacagcagcggcagggctgttcctgggcccccagcccccattcttgctctgggtgttacattctactctaggctgggtgtgaagggagtgggtggcgggggcgatgagcatctctgctggggcgccctaacctggaaaaccattgaaaacggctcaggcttgcaagacttcctgcctccccgggattcccagaatcttcaagtggacggaaaggcgattcctaaacaagttatagaaacttctagatgctatttgagatacatagaattctaatttatttaattattctaaaaattccaatcacaatggcgcggcgttagccaccacaactttgcagggcaaaaaaaaaaaaatacttcctgaactaacatatgtttcacaagtgtgggcgcagccgggacaatttcgagacaacttcgagacaatttcgaatggacaaattgcggagaagttgcttctgccgctcagaagccggttcacctccttctccaccgcggcatttccaaaacaacagggacaagtctccccggctcgccgcaggcctgaccgcccagctccgccaggatttgcagagagcagcgcgctccatttgcagaaaggaaatcgagtaggtcctcgcccccgactggtgcttcttggggtgtggggtgcccagggaatgggcttcctggaagcaccaaaggagcctgcggagcctggggatggggtgaggcagccggtcccaggccctgggatccaggcggcgcgctgaggccctcccttaccttccagcgggaacccgctacgcgggtagttctgccccgggcccggccgcatcatcctgggcacagcgccggccagcgtggtcatcctgggggcagcttcgctcggaaattatatccaggtgaaggcgaaacggaaaggcgagtgcggcgcggatgaccctcgggaactatccggagcgtggagagcccctccccaaaacggctggagagagagggagggacgcggggaggggggctgtcggttcctagtccagaggccggagctggaacccgggaaaggggaggacggggaggccccggagtccaggatcccgagcccagggcggaaaagtttggtacgagtctgggcaaatgttccagcgactggggtccctgaaaagggggctcagagagccacggcgagccggggagcctggtgaggctggagcgcggcctgcctgagtctcctcctgtggtgacaccgagtgcggggatccgggctcgggagcatttattagttcttttacccaaagcttggtcaggagccctgagctgcgattggccgacgggtagaccgtcccgggtggcggagacacgcgctgattgggcaacagcgaccactttctcttcccatctctggtggtgccgaggcctctgctggccccgagggggacccgcgctgcgccccttgcccaggagagaaggttggcccggtggaaactgagagagacagccccagggagatggcagttgctgagggcggagaagttcctgtctctctgtctctgtctctctgtctgtgtcactctgtgtgtgtgtgtgtgtgtgtgtgtgtgtgtgtgtgtgtgtgtgtgtgtgtctttctctgatcactctttccttgactttctatttccctctctgtctctttctgtgcctctgtgtgtgtgtctcgctcagcctctattcctcttgtgatttcctgtgtctctctctatgtctcattttttctacctgtaggtctcgctctcatttctcttggcttactgccactggagggggcacaattccaataagaaggcatctggggccccagacatatttagctttccttcctgtggtcagtgccccttggcctaggcttgttaaggggtcctcccgatggggctcctcctgggaggagtccagggtgcgctgatgttcttttgtcttctccgtccgcaagcggggctaatgtgaagcacaggcagccgtcgctaggcccaagcactcgttagttgaaggctgggggtatgggggagggtgcagaaaaaaacctggctcctcttcttggtgtaaaaaccgctctggcaagctgcggttctaaatctctacatatagatccccgatgcgtcgacagagatgtgtctgtatgttaaagttttgcccgggttcagcgtttgttctcaggaatttattatggcattcagactaaactgctggaaaaataaaaggaacgaagtcttggctaggagctgaagtgtccccagcaggatatgacgccaggagtgttgtaaagactgtctgtccttagagaaggtaccattgtgcatagccttttatttataacttggtaagtgccagcgaactcgcctcctttacacccccgagtgccagccccgcgctctgcactgcgctttattcgctcgagcctattcagggactgtcactccggggccgcgaggtattcagggccttaatcaatcaaaaggatgagaatcgggcaggtttttccctttgaaataaaggaaacaatgacttctgggcttcaagttcccccttttccttttatgatttttgaatttttcctgcccctggagggagttctccactcctctctctctgtccccctcccccacctcctttgacagttttgacgtgaactcgggcccccaaccctacttccccattccctaattaaggcaaactcagaaggcaagatgtaggggggtgtggggtatagccgctc

SEQ ID NO: 431 - DNA, 36169 bp, Homo sapiens
  source 1..36169: mol_type = genomic DNA
acagagcataatattgtaatctgaagtatgctagccaaagcaaaattaattttttttcttctttcttctttttttcttctcctgaaatcttctgccatagcgactgcatttgcctccagacttgtcagacacagtgagccgctcaagcaaaatggatctggcagaatccgccaagcggctgggcccaggctgtggcatgatggccggaggcaagaagcacctggacttctagggattcctccttagtcgctgcatgcagaattctatgacactctaattatgattgctaatagcttatgtaaatatttttcttaacaatttgaccctccactccttgaaaaacacaggattataaaatggtgccgccatttctcattttttaactttttacagaactagcacagcagaaatacttttaaatttttccttcatgctctagagaaaataattttatttttaaataaacgccaaaaaatgtcaaaatctcaagattcctgacagtggtcattcgtgtgtgtactaaggcatttagtgtcatggtaaagtgcatgtcacagcaggtagcatacaaaacatgatgaaattcaagattgtatgtgaaaacatactttctctttattacagaaacagtcacttgccaccaaaaatgctgttttttaaatgaaaatgtgtttactaatatataaaataaatttgcatttatgtatccagttattaaattgataaagacaaagtaatattttgggatttagattccactagagataattagtctaccatagtagttattaaatataaagaacttcagtgataggaaacatagaaaaaagaagtggatggtctttagtttagtaatcctaaacaattgaagtcagtactatgaaattatgtcaacaggcatcattcaggattgaaattcaaactgacagctacattaatgctaggataccaggagaaaaacatatactgaagcttgttgagagattttacagaacataggtctgagacaaagtgaaaaaatgaaactaactcagatttccattgcatcacataaatattttgttaataatgaacattggttgagtgtgtaaatttctaaccatgtaaacatgtctttggggggtatagcatatcgaaccagttttcatatgaaacattaggtgttttaattacaattctatattctcaaagcttttgacagataatggataaaaaatgaaagttgaaaagtaacttgcatatttaagagtcttgattttttaaaaggtgtttaacatccattgggagaaactgaatttccaaaatacattttcaaatgtatttaatattttgaagcagttataactagcatttttaagcagcttgcttttaatataccacaaattatactttatttgttcttgacaacattgtagaaaacaaagactaggtttttaaaactgtctaaccaatatgatgaatgtcagtcacttaaaaaaacccactgtagcataaacacatactgtatacagcttttattcagaattagaataattgaatcaatgacagtgatttgccaggatgtcaaatctctccatcatatcctgtcactaccagtttattttttgtgatcaaaatcaaaaagacaactattttgtcacccgctatttcattagtactaaaaatcaggtttcttattctatttttttagaatgtcgggtttatttttttcatttcttttaattctaaagacacagattcttccccattttcttttcaaaataaagtttcagaattgatctgtcagttaaaattaaagggctttatattaagcaaaggtgcttttaaattttaaagcaacttcaaaaaattgatttagtccatagataataaataatgttgtgcggatactccacaaaagctctgctatgtcctttgaaagcattatgaacattctgaataaattcaaatgagtattttagtcagtttattattttaataactctaacctttttcttaccgtgttgattcattttatacaacacacaatggaacaattacatagcatttgacttgctgaaaaagagatacgaggtcatcagatatgtaaattgcttgtcaaaatacttaataggtcattgatatacttccctggctaccatgtctataaaattaacagccaattactagttaatatatgctttgcaaatagataactactataaaaattgaatatgcatatttgaacccttattttaaatataaaagaaacttttcaaactcagtaaaagtgcattttgaataataagtgtacctgggctttccaaaaatcatatccaagtgctttgtttttctaattcactgggccggctttgtaaaaataagctactggagaggggtgtgtatttttgtcttcctctgataaaaacgcactctgaaaatgtgttttcctttcttctggaaacattatttgttactcattatgttaataacttactacataaacatatctctcttcaataatgctaccttaggtatagacaccattttgatacattatgaaatatacactccattaacagattttttttaattatcagcttgactcaaagatataaatacttaagaacaatgccaaacgtaatatctgaaatgatatcttttaagtgtttctagtatatgaacttcaaaaccctatatggtactcatttcttacactagatttgcctttctttaacatgagataaatattttgactactgcagtttgctcaggtgctcgggttctaagactttttgaatttccttttagtagccaccatacaatatctacttttctcttccatttattccttatgtccacctccaggatctttaaatactaacagtagacaaaataaaactactttagaaggaagcgacactctgcaatcaattccctgtccatcttttaacaaatcagacacacataggcatacaaaaggagagtggggggacccccctattcatttgtttaagcccattattaatgtcatttctaagacagcatgttactgctttccaaagatagtcaccgtcaacattattgaaataagcagtactaaccctaagtacttacactttgaactttaaaaccgagcagttgagtcattcagtaccaagccaaaacacagaaaaacaaaaaagcagatgaggtttattcttgagaaatgaaaaagagaagaatatatatttcgccttggtgagccaaacatacagagaagaaaaggctttttaaaatcttactagtatgagaggcccagagtaaaaagaaataagcaaaagaatatagacacaatcctaagatgacattcacagaacaaagctgaatcttcaaataatactgtatgagtgaatcttaggaaacctagtgatgatagtaagaagaaatggcagtgagctgtagcaagaaaccagttgttcaccatttaagggttaggaggcatagctttgggggaaaaatattctagaaattcattgcagtaaaatgcatttttttacttagagcagtttgaacgtttattacttaaaacattcagctcttattctattcacctggttttcccaagtcagtcaagtttggagaaaaaatttagacgtttagtcctgggattctactgaagtcttcacaaataatctccatcctggaagatggtgtcaaaacatccctgcagataccccattgataaatatataaatatatgtatcgttaaataaataataaacaaaaattatttcaacaatgagtaaaaggccaactcccaggcactgctaccacacagagcctgccatgctgtccccaagagagtgcctggagctctgtttggaaggacagctcatgtccctagggtgtgggcagaaggcaaggcagccgttcccatcctgccggaccagagggcttctgcagctgagcagccgcttcttcagactataccagactgtgctactttgccctggcaatcctgaccttcagagcacacatatacgtgcccaagtgcacacatacagaccctccgctcccacgtcactccttttctcccattcccacctcttgcacctggcgtgcgacatccgggtctccaaagtctctgctgtctacacaacagaaccgtgggccggaactggctgcctgaccgtggtggaaattacagccagcgagaaggaagaagtaagccagccagcagctgtggcatgcactcccacatagcccttctctgacagttccctcagcacacagccctcagggaatgtaggctgcaaaatgtcaggaggtagaaatgtctgcaccggcaattgtaccaacagtgcgtatgtgtgctcactcccctgcagaaatgtgctgctgtgcagtgcaggctgacactgaacaaaactacatgcacacatacaaaaactgcaacttaggaaggtgtctccaaatgtgcagcaactctggtggaataaaattattagtatatttcatgccggagcaatgaatctcaattatctgttcacaagtaattccttaactaaaaaacagtagatattgaacgagaaggtcatgtttaaatccttccattaatttctacatttctgatcatttgcttttggggatttttttaaagcagagtataattcagtggaagtgtgtctttgtccccagaggtttctgcatgtgcaagcattttaatctagactgccagaacccccaggctttttagtgaagtttgcagaggaagacttatctgtattgacttatatgttgcacagaacaaatgaaagtctcagacagtccttttttacccaacaaaggcttatttttttccatcctttgcttgggctcaagcactcctgccctgcgtgcctccactttaaacatgatcagaactgtgcttcattgcaaataacaactgaccaacaatgggccctgcttcatagatttgggaatgtttggcttaagctgccaatgactgaaggcctttaattcccaccggccagtcacagtctgctttgttgttgtctgttgatgtgtctgtgctcattattccttgacatgcaacatcccccctccaccctccaaccatccacaaccgcacagaaagcaagattcaaatgggaacagctgtagtggttcaatgggaaatgatgcctcttgtgcaaaggggagggagacagaaaagggagagggcctatttgaaaaaggcaacagctttcagaaagtctcctttaagaaatctacttttgaatatacttcagtgaaatcattgttgaaataggctgacaatggaaatctgcccagattgaaaatgccagtcctaattcaaaaaacaattcctagctaatcgcttgttgcatttttaaattatttctagactttgagctttagaattaaatggctaactgggaaatgttaccattttgtatatatgttgtgggtataaatgggcacagatctacaccctgctgtaagtggaatttttttctaacacgtttttgatttatggtatctataaggattattttttaaggatcatcaggatgtaaaacagagtgtgtgtgaaagtaaccattggtttagaatgttgatctaacatggaaataaaatttgtaacaccacactataaggttaaaaagaaaactgtataataaaggaaatacaaaggctttggcatggttttttacaatcaacaatggttaattttgatatgtagttgtgaacaacttcaaaacacttaagtttaaaactcttgcaagcacttttaattgattaggaatgaactctagatgcacaaaatgattggaccgtgaacagtaatacaactatatctaagaacaattaacttttgctggccaaaaaagaaacgtatgattgcatgaaaatgtgtataaaacatctatattcttgtcaaatataaatgaaattaactttattatagaaatcattctgaggatttctagggaagacaaatacttacattttgacataaaacaaattggattatatcgaagacacactctaccttttagctatcaactttttttcttccttgaatttatatcttacccttttttgcacataaacttcatctgttaacaacctttggaaaaccaacagatatttctgacataaatctagtgcatgttgttccaggtttaattatatgcaaaggaatgatacaaacttggaacatcagtccataaactatgaacagatgggtagaagtattcgatatatcttgataaaactcttaaattcgtggcaaagcttgttgatcatggttttctttttaaaaaaaaaaaaaacaacttcatgaccaacacagatcaaacatccatccagtctacattgttctttttttcattataacatacaaatgcccatttacaaataatacaccaaaatgaataaaagtttggataccaaaatgaagatttgttccaactgatatcgtgccttctgtatacaaaggtccttgtttcaagtccattccttccccagtggtacaatacaggacacaattgtagaactgaagcggctctaacagccatttttctttctttcctgaaagctcaactgttgtgtccccatagtcactgactgaattaacacaatatttcctttcctttttttttttttttttttttttactgtaatcttggccagtattgagacatatcaggttcacttccgggaacttgaactggaactgacacaccaggggaaatgagtcctagaagtggatgaaagaaatagccatgtagatattccctttgagaaacagacatggaatacaaatttataggtttacaaaaaaaaaaaaaaaaaaaaaaactaatactttctaacattttttactgtattaaaatcacttcaattgttacaaataaaagtagcaccttcagaaactagacaatatatgtatatatacctattggatcccaagtaccccccaccccaatccaaaggaaaagaaaaaaaaaatcctctgtttgtttgcatgtttggaacttttacaataaagctgtctctggaaaaccaatgtgtcactttttatttccagcaaaaggtctagaggagctatgagggcaagaagcatttcaacaagcacgcacctacagctcagtgggccccctactgagcttcgtctaataatctgtcctcagaaaacttgcagtctcaggccttgtcttcatacacaacttttgtgaccaaattcaggaaaaacaattttagtttttgtctatatggtgtaaagttactaattagcttaactgaatttcccttttcaatccccatcccccagggacaaggaaagcaaggagttaaacacgccctcccataagaccaggagattctgtttgggtaaacttctagtgaagagagatcgcctctgtgcagcctgcagaaagcagtggctcacctgttgaagtggtgcccgaggtgcccattggctgactgttcatgtgtgtctgcatatgtgggggggtgtaggtatcataactccgcccattcaccgaagggctggtgggcagcatgcaggagtatgaggaggtctggctggggactgggggctgtgaggagagaggcaaacctgtggttactgaggaacacatcacacagccacagccccaggctccctcctcccgaggaactctgccaacaagtctgatcattaaagatgccttcacgtgaagtactggaattccatatgataaatctaagattgggcctcgagctagtccttccactggccacagctagaagaaagctgcctatgtatcaagcctctaaagcactttaggttctgacaactgtccagctagatggttgccactatccataaattaataggatttttgtctctaacctctgctagcatctttgaagaacctatagcatgaggaccttcatcaaaacacatcccctctccctgcaaatctggatttatttgggaaccctatgacccccagagcccatatctcaagctttgggacagagagcagtgggaggagctctcagtaaagtatggttcagggaccttgggaacctttcactgatgggattaaagattctttgaagaagcagatctgtaatgaccccaagttaaagtgatcagaagtgttagtaaatataacgacctccatcctgagaattaaccatgacttcctaacagacccaaaagcccagactgacttataactagaaaactgttgctaccctcgaactgttcggaatggcagcactgaggaggtaaacctttctcctaacaaaacgcctcatgagctctcatggtactatgccatggcagcaaacttgggatgaattaaaagaagtgtgtcgggaacaagcaggtcagatgatagtacagtatactatcatttctcttctctgcaaactggagaaatgtttaatttccaaaatccatatgctcagagagggaagcatatcagagaaggtccagaggaagacacccaccatttgtaaaatgatgattttggtcaagagaatgaataaatggatagacaatcgggctcacccactccaaaattcaaagagtagttttctctgaagagtaaagttattgatcattttgattttctttatgcttaatgaatgcatgtactttttgaattatacaaattatgtaatttttaaaagtcagtgtttgaaatagattgattccccataccgctctgtatgtggaaacagccctaatataattgcagcatctacttgttcgtcttattattttctcacatacacattttgctatcttcacagaaacctggatgttgttataatacatgaaactgaacgagacactctgtggccttattaaagtcagatgatgaatgctaacatcaagttcaaagaggcaaacaggccttgagggcctgccagaatttcagcttgcatttgtttctaattcctgcaatgagttcctctaggcaacctgacttctggaaaattccaacgcagttatagcaacaccaactaatgggctgttaatcccttaatttacatcaattgcactatggccaacaatatccagatgcaataaaaataaacatgtgaataattcctctgaagttgcttatctagctgctcctatattagtctgaagactgtgaaacatttattttgctgttatttggatttgaaatccagcaaaaaatgttcaatggagaataaacaatcagtgtagccccagaactgtttccagcagaggctcatgctggccaatatcgtaccatctaatatctctaattgttgcacaaacaggagttctaggaaaaccactgggaaaggcctaccagaagacagacatttttcctatcaagaatccatccagcaacaaaggtctagtacaaaccatctgccttatccaacttacatcataaagggtgaacctagtgcaggacctctaaatgtaggggctaatagatatttgggacagaactaagaggagaggcaggctgtcataccaagtgaatagcatcaagcttcccaggcagctaggagggccacaaactcgtcacaccattcacagcaaagacacactaaatttccagcaaatacctgctatgccttttcttattgtagatacagacagaaaactagcattctcattatattatgtatatctcaccatgtaaatatgaatcccatttctgatccttttttctttctcactagtttatcacatatacccaaagtaatgccccaaatgcgtgcacagattctatatttagcatacaaacacattaatataaacccaaattttaaactactaatctgctatctgataatgtgccagcattatttccactttctggtgcaaggctccctggtacccaaaacatgccccaccaccacccaacattatcaaggtaacagtataataaaaggcagatcaacctgacaaaactggacagatttttattactcatttttttagggcatgaattaatgagtcaatcacttaaaagtgatgggattgactgtctccgacttgactggtcaagccaatcactgtagtgcgaaaagctctcaagggtgcagacacagccaatgaggtccgcaggccctgagccactcctcacttctctggggcctgggttatgcaggccaccaccagccgcacttacttgcataggcaggttatttgccatggtgaagctgggcataggcggcagagcgctgtaggtgtttgtgagggctgtgtctgttcggcccaacatggagccagatgtgaaggaggaaactgagggcaagagaaatgacagtagtcagagtgagagtcagagcccggagcaaacaggtttaaagacattgattcgtagtattagtatttcaaattacccggtgtggtgggttgtggaattggttggtagacactggtgctgaaactactgctgataggaatatgactaggtgtgttgctggcctgtcttctctgattcctcagtttttcttctcttctccatttggcccttcgattagaaaaccatacctggaaatcaggtgggacaggttagcactgtgtctacgtcgagcccagccccaccttggcacctccactgctgccctccccacgcccatggcagcagagcatttagcagactgaacctttttattatattagtcctataaataaatagtactctgtacaagcacctctgtctctaggaaagacaaatggtatgaatcacaaagtgtgaaactgcacagtctctcggtacctgtattcttgcttcaggtagatctattttggctgctagtctttctcgggcaaacacatctggataatgggttctctcaaactctgaaagagtaagttgattttccatattgtgccagaactacacaaaatatgttgaccaaactgtgcatcaaactggttcccacctccccactcccattacctccaaccaattccctttaaaatgcttctagtgttgactgtacttggaagaactttcccaccagaaccaagttaaattttctttggaatggcattcagtgacctttctgtggcctgaaatagccaaatcatcatttttccttataagtcagacatttagtctttgaattactggtagatgaaaagaagaaacacacacacacacaccacacacacacacacacacacacacacacacacacacacacacacacacacacacacactgaaaagatgcccagagaaataaaaagacagaaaaaaggaaatcttttcattcttctatgcaaagggccctggctaaatttagctctttgtactgaagatgtggcatttactttgatttactgcttctctactttgaaaaactctatcacctttctccagggcctcaatttgctcttgggtaaaggatgttctatttctttgcagcttccgcttcagctgaagtcgcatttgagcctcatctgaatcttctccgttggaactgatggagttggtattctctccccctccttcctgttgctggcagccatctggaacaaaaagaataggatggtaagagaaatttggattaacttggagcctccaaaaggggcctggtgtagtcttaaactccaagagcattatatcccgacagcctcaccaaaacattcccaaggtaactgtcagccttcttttaaaaaaatacatttgcgatgttagttacctgaccaccattttctttgtttttatcaagatgagactttataatacacacactaagtggcatttcttgaatgaaaaaataagcactgaagtttccaattaaaatgatcttttataagtaaccccaactccccaaatgcctcactccactccctacagaatctctttacctatggctgtgttgggaaaatagaagagtgatgttcaagatttcagttgatctataatcagtaattcctatctaatcaattagatgttgataggtttgtagaaaatgctattaagaaaccaaaccaagcttgtaatcttttttaaaaaatatttatctagtttttatttgaattctgcacagtcaatttcatttaaaggttgtgaatttagaagtgctcgcattgttctgcagttttattcaactattgtatgagtgcgcttcgccttgacacctattacgagcacagctgtaattatatcatcaccaagaacaggctataattgctgaaaatggaattttatatttagataaaaggactgtccattctttgtaatgtgttgcaccagagaaaagtaagatttcttttaaatttttaacgtgtaattttaaaaaagaaatagtagagagttcactaactagctaaatattctatgctgcagctgaatctttggcatatcatttaagtggtacatttttaattagggcatttccaccactttgaatgtaacttctatcattatacagggggaaagttttatggttttcccttgctgcctggagggcaagatgtgcacttgggctagctggctcccggcttgcaccttgcctgtaaggccacagtgaagggaagcaggattgcctaaactctgactgggcctccagggccactacaggctgggtcctgggtctggggtcctgaaatgacccccaagggataccagcatgggctacccacctccctatcctcaaaacttggccagaggcggggtggaggggcccctaggagcgccttggtgggaatcgacttggccaggaatattatttataaccaggagacaataggctgcgccttcaaagagttcagggaattgtgacaggatctagtgggatcttttcaggaactttgaaatgttttaaaaccccaactttctcccccatttaaacaggcggattcatcggcactggccaccatatgggcccttggagatctattgagatgaccaccaacacttgaatagcgaggggctgcttttcagcgctgcacaatgccccgcgagtaagggaaactattaaactcctggggcaggagcgttggcaaactttcgtgggcagaattttgaggctacaatgagcgcggacaacaaaaggattctcttgaggcgtgcagcgggccacattgtgttacaagaagcccagtcaacagacttttcagtgaagtgtgttaacccctctgctctgctatcattaatcactgtccgaagagcgggcgcctccgtgctatttagggcgcttggctggggggatggagggtggatgggggggccagggcccagcatggggggaggcagggagagtggacggggaccagggctgggttcctacatagaggagatggaggggaggcaggatggaaaccagcggtgggggtggaagcaagggggaaggattggggggcctgggttaggggaaagacagagggcgatggagggaaaaagagggcgatggaggggaaaagaaggctcaaaaaacatagaggctagaaaggtatttttaaaaaaggacagaaaagaatgctgagaggaaaaagagacacgagggccgaacaagagtgggagagagaggaaaaggaggatgagggccagagaatattagtaactgagccccatctggactctgggtctttgcactccatcagaaaggtgggggtcgaggagggctacttagctgagggagacgcgctccgctcacgtgtgcgggcacaagcgtctgtgctaatttactgccccaagtttccggggacttttcaaagcgtttttcaagggaagaaatgaagcgaccacccccacccctcgctttattttcgggtttggtgaagaaggaagactggaaatagctccttttggccaactagaaaggccggagggttattgcttttggaaaacagacaaaaatctgtgcacatctggtatggggtgggggacactgaggagaacacaatgcccatctccccatggccactcatgcccatgccttcctaggggccccatctcggtcccttttctggcacattcgatctcgccaattaaacaaagttgcccgaatctgcctccgaagaaccccgccgatagcatgctctgctctcatttgcctctttgacattttcttaattttaaaacatggagattcacattcttatccatgttctgtctcacacaaacatacacacgggtttacacaggcagcacgcgatcgccgccaggccctgtgctgcctccagaactgacacttaagagagaaaagtcagcagggacagtagagctcaattttaaatctggaaaaaaaaaaaaaaaaaaaaaagatgggaagcggggattggaattccacagcaaaaagaaacctgtcgctgcaggatcccttctctaccccgcggggagagcggcacggagacagttcattactttagaagtggcaactgtttgcagccaggcggtgacctagcggctgctcttacataaaatgggtacatttccccccactttagtggatttgccttccactcttaaagcttttaacaaaataaaactagaagttggatctcgactcccccacccccacgataaacctaagtggtggacaattaagatatcttcttcaaaaggcgccccctcggagccgcgcaaagcaggggccttcagtgggtgccgttcaccttccagcctaatccgtgagaaagcgagtgaaagcgcctcccattatcccagccccaggaccatctgacgatgggaataggatttgtttcctggaaggaggtgagagagagagagagagagagagacagagagagagttgctgggaaataaaatcattccttagtttcttagtgtcttaatcagtgaggcggaaaacaagcaagaaaagatagcaacccggttgcggcaccttttcagctctggagcgcggatcaaaacattgtagcatctgttgaaagagaggctgactaaatcctatagagggcttgggtattatggggggtgggggtggggtgaggggaggagataagaaaaagtgtctccgtgatccctaaaaccaccaaatcgccggagaattggggctggatagagttgtctcttgttgttgtcagcccacgtcgtcgcgattttattcaccgccgcatggcgttgatcagatggaaaccatatttgtctccctctgagacctaacccccgccttatgcttttggagtatggactctttaaaacccaagaaaggcttcctgggctgggaaagggggctagggagggagggggaccctcttagcaccaaaaagtctgaggattccccgggaacgtgaagcgaagctcaccaccggtgcccgctacccccacgccggcaactctgtgcttcgtttggcccacgtgtcctccccacgcaactaggggcgacggtcctgtgcctgaggtgacaatcaccccccaaaaacctcacttgcgggtgggggggtggtgattgccagttgacccagaattttctagcaactaggcgcgttaaagtgaaaagcccctggactagctccacctccggccccaaccatcacaggcggaccctagctgatttgactctcacttcccgccctcagactgccggcgacgaaaatccgcccgaatcgggcgccacctctggtggaagctgctgtcctcggcttctgcccaactccaagaagcggaaggggggtgtatcctgcgccccaagctcatgggagcccacgcaccggggagagcccggagtggaggctctgggctcagccctcccaggcctaggccaccgtgccctgagtccctccccaagacttctcggactaagtgggccagactcttgtcaggggagggatcaccaggacctcagattgctgggggcggaggggtggacgctcgtgagtgcgaagttcgggtgtcacttgggtgtgtccagtgtctacaagtgggaatcctacggtttcaaaagtcaggcagggatggggttgcctacactcggtggggtcaatcgctagtctcaccagaggcgggagcgggcctgggggccctctgagctcgcggaggcggcgggttcggggcccgtgcgggcggggtcgcccaggggagcccgggccccgcgcgtcaggaggcctccgccggccgagcggccgcgctgggaaacaagaagcgagcgctttgctccctatcttcccagtgtccgtcctatattgttttctgctcttaaaactgacatgtctaattggcaattggtgccgaatcgtgtccagaggtctcttgtggaacatttctacagctgtctccttcaactagacgcttattcatgtcgccttaatgagaaacaaaacgttctctaatgagcaattacagagcgacaggattgttcccataacaaattcttgcgagtgacagaagcatcctttgtaccagatatttcgcatactgttaccgattttcccttccctcgcccgactccatggaggcgccgggcatccggagccggtccgagagctcacggatgcgccggcagcctcctcgcagtcccgcgcgccgcccctggccccgagcccctcggctccgttgtgctcctgggagtgagacgccacgtcccattatcccgcatattatctccttgtcacgaggacaacaaataccgattaatcttcggagtaaactgtttcctattcttgaccaagctacctcggggtgtggaggggagcggaggggagccaactgaccctcccctccgccccaccccccccatcccccgctcttcttcctccagcccttctcacagaacctggggtgtttcaggtcccatctctcctcccagaccagagcggctcccggcatcccgccgtcctgctcacagtatcttcacctcaccacttccacatagtcgccacccacagagagtgagaaagtgggacccagaggggcgaacgggggaggggcaaggatagtggggtggttttagttgggagaccaccacttccaatgccccatccccgactcgccctgcatctccctgctcaccttttcatgtgcaccctactcatagtcacataatttgtcaattacagcaaaaagcaacaggatacaattatgttaacctcgcagtctgtcagtgcgttatcttgtcacacttctacaagggggctctccctgcattctaatgtcaaatttgaatagtgcaccacgcagctcgttcttatgcacacagtgctgcccacaaacacacacacgcacccaccagccaccttcataccgctcctgacatacacaaccctcacattcccaggccaacaaaatggttcaacaaacaccacctacatacaatgtggtcgatgtgtcccaggccttcaaatgcagtctcacccatgacattccccaagcatggaagccctgagaggaaatggttgggagagtaggggacaggcaaagggatgcacatatggagagctgcgtggatggctgcttgggttttaccttgcgtaggttgccctggcaccgaagtccccggataccaaccagggcgggtgccccagcttccggtctgcccgttcaacatccttagtttatcatacatgccgtctgcgcccatctgttgcttttcgctagccaggttgcgaagaactctgtttattgatgacacctgcaaatcaaaccaaaatcaaaccaaatggtagtgtctcctgaagacacagtcacccatctcagctcacccacaaccttaaaaagcaactctcaacccgttaaaaagctcccagccaccccgggacagtgggtggatttgcagatacaccgtggaaaaaatgatagctatcactttgggcatggaaatttagttggatagagaattgggcggagggggtccttcaccattgcttggtgtctctggtgacctaactcacacggttgctttgctttgttaaaagactgcccgaaaataaaaactatttagacttgttgtaaagctttctttcattatattgtttaatattaggatggaaatggatgtgtgacacctgaaggaaagttctggcaggtggattaggacgaagttacaatctggttctcattttccttcttcattcaagtgcctttccctggtgcctccgccctctgttttgcagcatgcaaatgaagtgaatgactccccacacttgactcccattttccagacagtcaaagaaaagtcagggcattcctctctgttcccccaggtacaaaggagacaaatgtggagcagggagaggacacagactaagagacagtggagagagagggtgggaggaggtaaagaggagagagcattgggcttagggcagggagggcagatgttctcaatgaacttacgcttggtatgttatcgttggtacagaccccctcggacagtaatctgtctcggatttcccaagcaaagatggacgggcactcccgcttatactgggctattttgcttacaacttctggagtcgctactctcggtttactaccaccgattgccctgggtctgatggagccagtctcgtaatacctgcccagaattttactcacacatccgttggacacctgcataggggaagtggacagaaaaccacattattaataatttcaagacaaaaataaaattgtttaagtatgcattaaacaatgacaagcttacgttttgattgtccagcacttggacttttgcatctgcatgggtctataacacaaaaatataccttcaatggtatgagaacttactgtagagagctttttttcttaaaattacatttgtagccctaaaaactacaaatatgatgatactttcaaacaatttgaactaaaaaacgaatttaaaagctttttttaaaaaaaaaacttttcttaaacactgcctgaagatgcatcaaaacgaagtagataaatttatttttgtgctgaccttgcttaaagtggcgttatgttttaaagaacaaaggtaaaaaataaactgatttttttacttcttcttctttaaaaaatactcaattgagtaaatgtgagttagggaggagtaaatagcatttgccttttaaaatcaatatatattattcataaacatgaagaataaacaaatacctcaaaagctgaggtaagcatgggctggggagagcagaatgaaattatgccggtttatataactcagcttattacggttcataaactgttcccacaatgaatgtctttaccaaataaaaagagaaagatttttttaaaaaaatccgcacacaatatttttctgaagcagatgagttatcttatgtaactgacccaggttgaaagagatagggaaggatggtggaaggagaggggaaagtgggaaggcaggggagtgggtggggggactggggactggggtgggtgagggtgggggggtccataattagcatcgtttacagtaagaaatgaagagagggcgttgagagtggagggccgcgggggcggcgagtggggcggcgccgggaggatcacctgcagaattcgggaaatgtcgcacggccgggccccgctgtgagctagctctacaatcttctgccgggtggagtccggcagtggccgcccgttgacaaagacaccaccgagctgattcactccgctgtgacctgaggaaagggagaggagaggaaaggggaaaagaagagaagagagcagagtgaagaggaagaagagggagaagaaggaagaggaagatgagggagaacaagaacagaaaggagaggaggaaggggaagaggaagaaggagaggaggaggagacaaccacaatgcatcctcatccccctgccaacctgtgccaacctcggcggtcagttccctgctatcgatcaaataaaggacaacaggaccaccagccatgccagacatcgggcagcccagtccaagcaaccgtgcccctgcccactgtactgcagcagcaacacagagtcagacacatgccaaggaacaagtacacatggacctcactacagccataaccccagcagtgtccccagcccactgcccctcttcataaacactgcagccagcctctgaacccacaaagcgctaagaaccggctctataaatctcccaaagatcccctctgagtgtcaccgcaaaccatgggttctacagatcccacactgaaccttcaaggtctctgcagtgttgggacagtgatagcaaaccttacagcccttgagtgctcccttagacgctaaaatccagaaatgtttccatcaccgtccaaactggccaaggcctggcacaagcatcgagttgggttttgtttggttagaatagaagaaggaagaggagagaacaaccagagcagccagtatgtggctggtgaaccccagtccaggtttccgcacctccagtgcagacgtgagagtcagagcccgggctcggcttcagccacagacaagtccggccaccgcaagtaaggcttagagccgggagtcggttcgcaccagccactgctcgctttatttccgccgctgaactccgccctccccttagccaaggatagatattatcaaaaagaaaaaacagaaaagaaaaataccacatcatagtgttccccatccctcctttatctttgtatctcacaacctcatccctgtggtccaaccttagagaatagggagagggagttagcccctctttgtagtccccctccccaaaaaccacagacacacaaagccaattgccaatttccacttccttaaaaatctccaacctgcagccccgacttagatagcagccctcccaggaaaagacgtggctccctgttcagctctcctctcctctcctctcttctccttggagcctactgataaattgacgccaggagcctgagcttcttagcaataaataagctccaaatatagaagaggggggaaaatatgatgagcctctctgacatttgtctttaaaataaaactagctgcacgtcaagtttgagcttaatttctggaaataggcggaagtcgctccggatcatgcatggaaggctaattgaaaagatcagtcggggcgcttgtggcagccttgtcactttgtgacagtgctccgctccgggaaattgcatcgtcacgacaaacgggaccgtgataaaacgaccctttccgtccttatttgtagatcactcagacgagattgaactgcacttgtttccccttcgaggggagccgcgttttcagggtagccgaaggcttggggctgagggggggccctcaccaaggcgcgggtgggggccggagcctcaactcgatgagaagtgacaggcgtttgggggatctgggctccggccgggaccagcgcaagcagggactttgcggggacaccgcttctccaacagagcaaggcctggcccacgtttccggtttctcctaacttccttttattgccttcctttgcttcgcaagttccatctacccctccagctacagagccccacctctaggcacaggaagcttcccggaaaaagaaaggctgtcccagaaagagaccgagagagactttccaaacttcgggcatagccacggcaattcccagtctgctaatgccaaggcgggcgcgtaaggccgcctaaatctagacctccctcctcactcatttcaaaaaataacaacgtgccagccacctccgcagataccgccggctggtgcttgcccaggagacgccagggccagagcgccactcccagcatcgaaatggcagagagaaagcgcagctccaaattccccttcagaggttaagcctcaatcattgtgtcccttccctagggactgctggcgctctcgcccactggcgatgattatgcgcctagaactcgaccgcgaagcaactaataggaaaacatatggtgtcaatttggatgctccgcgcctcgcgcacacccgggaacgagcggcacaaagccctgccggccggcccgcgaccccgcgcccctcggggcctgccagccgggccgcagcgacaaacgctcagggctgcgcgccctggctggggcccgcccgagagacagcctgcggctggggagtctgagctccaaggggagagcccagccgccgaaggcgagcctaccggccaagccctggggtccggcaggttctgcacaactactcccgcaaagctcgccacctttgtgccctttcctcagctacgcgcttaccagccccggaagcaccagggggcgaccggcgtttccaaaacagatggataaggtgctggggaccctccttaagcctgtgtggttcggccagggcaggctgctggaagacccgggcctttccacactttgagttcagttgagccccgacgccgtgtgcctcaaccgtaacctcaaaccgggcctggtttcgctgggcctccaggctcccaggtcggagctctagactagccctgccgcgtaccagcacccaccacgaacaggaaggtgggtgggaccccacggggtctgggcagaggaaagcagggaggtacaagggccataagtatcaaaagcgctctgggcctgggactatcaggacccaagcaattgcagttgccagggcagggattttccaattcctgggcacctccttaccagacccagtaaaccgtgctctctcccgcgccctgtaacagcgagtttaccacccctaccctgctgcaggcctgggggctcctctccccatcccttctaggcccgtagtggggtgaggaggggaggagctgccctgagagtgacttggggagagaagcccccaaccccgccgggttggtggagactttcagtcttggctaagcccaaaggggcctccttctcgctcaactaggagaagacttcgccccgccctgatcagcccagcccctctctccggggtcagagcccgggcaggggcgagagggggtgtgagttacaggatttgggggggatggggtttctctaccgcagcttcgaaaactcgggcgggctgttcttaagggcccagcccctgcttctccagtatcgagaagagccaagcaaacgccctcccctcccgggctgccgggcgcggagcggggagcagccgccgcaggtccccgggcctcagtcggtcggcggccgggccagcgcgggcgtcgcgagtccctgtgtcctcccctgaccctcgggtccgcgcaccccgagcccgaagtcccagaaagaccagaggcacttactgttctgcatgctggctctggctgggggccgcgggattccacggggctcgaatatggggctctgttagcaagaaaataggagttaatcctcgggcagctgcatcaggtaggcctgaactcccaaccgaggtggacctggggctaggacaggagaatctccgttctttaggaattgatccactcaacctcttggggcgatctgagggtcactcagctctgccctgcagtgcatacaaaatctaccctttggggcttgaaacaaagtactggaatatccccaatctgtttcccctacattctttagcagttaaccctttaatcagtagaagcgatgccccaattttgatttattttcttctatctgaactatagtgaagaagcatactgaaatagtttgttttgactgtttgtgggttttgagcccaaagcagccaccacagaacttgcctgaaatctcggatgtctgtccactctcacaataaaaggcctcacacatctgcgcgcccctagttaaagtcttccccctaagacaaaacagaaggagaaaaaggtatatcaagctgtggttcaacagcatacgtccatgggctctctgagcctcactctcaggaaaaacacatgcatctagggctcagtcaaactgtcatcaaactctaagtcccagcattacacccacattttcagcggcatctgccacagaagtctccatcctttaaaagaggctgctctggtctggcttgggagaattggaaaatctagcaagttcggatcccactttgcaaaaatataaagaaccaggaaaaggggaagggggaaacaggaggaacagtggagtaaggagtagaggccaagagctgaggttgaaggggtgtgaggggagaggaatacctgaagtttggagaccaggggaagggaaccttggaacttcctggtgccggagagcataggctggagcagtttgggagggctgcagggccacactccctccttccttaaggaacttcacaagacccccagaacccaacactctgcttaccctttatcttctactcctctccctacaccaaaaaaacttcccaatggccccctctccatctacctcccagctttctgggactttgaaaggggcaagcccaactttttatcccaaacctcacttattgtgattaacttctcttttggcgtttagatcttcacccctttaactgtactgtgacacaccctgtctacctcgcctcactgctttaaaaagtacgaacaggagggggtgagcgtggtcgacaaagccgacagacggcaaacaatggcttctattctccagctttcctcgaacccaaggagcaaaaccgagtctccctaaccagcaacacagcttccaaccaaatgtaccaacaacccaccaactcacaaagggaacagagggacgcttctagcttcataagccctgacccagtgcaggggtccccgaggctgctcccgtacgaacacctccctacctttcccaaaggaaaaaaaaaaaaagtcttttgggtgagtggagaaaatagaaaagtaatttcttgttgtaaatatctggaggtaattgtgttactggtgtgagttgttaggggctgtaaaaagatacaacggcaccgtggggagctcaattgggaagagagagttacaataaagagcccattcaagaggtctgccccccaaaaagaggtaaaataacaaaacagtcacagcatcatttctctctgtttttttttaaatgcattattttttctgttttacctatggtgattattgatctgcctgcctgcaagcaaagaatttcaagaagcacattttactctacaaggccattcctggtctactttttaactacttggtagacagcttaaatccataaaaataaaccgaaaatgaggactttttctcagcattgggtaaatactggccacagcagagggttactagttacccttatctaggttggctctccaatgcttccttcctgtctctcagtcccggcacccatagccatgccctggataggcaaaatctccaactctaatgcaaaataccccaccccaacaaatgcaggaccctgaagctgcaaaggagtagtaggtggggagatggggaatggaattcccctaggaggggtaaaacttccagaactccactttgtaacccacgctgtgcacaatcacaacagaatgctcccatcctggcttgtaacttcttgataccatttttttttaaattcagtagctgagcacaaagaggcctcgttgattagttttcgaagcagctgggaaggtggtagtatttcaaattccagttctgctccattcccacttccctctcgctaagaagctatctaattacttaagtaaacgtgaacactaagtgcagaagcaacccgggaagtggggcacatcgacacccggaagcagtcctgtgcaccggagaggtcagacccccaactgcagcctcagccccccagctcagcccgaggctctgtacggcctcgctggggccatagaaccacatcctgaacgaaggagtctccagacattttggagtcgccccagccttggaccacaagagagtggtcactgcccccacctctctgtccccaacacaagcctcagttttcaaatgctgttctttttttaattacttaattctcaaattccatccccaaactctttaactgaggtaaaggggagagctctcggtcctcccgcccccagccaaaagagtaattagcaattatgatgacaaagttttactctctagggccaaataagataacaactaatcaaactgccttcacgcttttgcaaaggtcactggctataaaaaatgtaatgtcaaccgcaacaactattatttctcttcagtaaactcgccaggctcaagctctttgcctttcatttcattttctgctcccagccccttctaaaaccttcccaagttcgagttaaacgtccagaatggcttagggagcttgggagagtataagaaaaataaaaaggaagaaagaaagaaaccacgttcactttgtttttaaactttctagaaatcgctcatgaatgaagagccaggttttagcactcgaaaaagaaagcatttccacttgaaattcaactccatttcccccaattacacttgctaaaattcagggctattatggcgcagggagactgagaaaatctgcacaaggaaagaggcaacaactttatgaactttgaaaagacacttttcctcctgggatcttagaatcgaaagctctcaaattactccgactaattagccgggagaagaagtgatcagacgagggggaaggccaatgctttcatacagatttattttcaaggccttaccaagaaaaacataaggggattcggagtaaaacaaacaaaaaagcaaaccaactctgcacctcaaaacttgctgaaatcccaacacctggtgagactggatcagaggaaaacaaggaaaaatacccaccaagcgcagggggccggagaacagggaagagccccagcctccgcaaggcaagggagatgagagtcgggggaagcctggggagcagagagttttcaagttccgagctcagcgctccagtggagttgggggcaagagcccgggggctgggtggaagctgacagtcctcccgctcggctctgagctccctcggagcgcgcgttccaccgccttggcctggtggcttccttcccggctcgcgctagctcgctcttccctctacctccagcgtgcggctgccttgccgactgactccactcgggctggtggcgggcgcggtgcccccctcggcgctcgagtgccggctgactcttctgcgccggagcccagtgcggcacaaagcccgagggccggcgggcgggcggagacgcggcgagcaggttccctcggcgctccctcggcgagtcctcggagcgcccgctctctgcgcgttcgctgggcctcgggctggacaaagcagccggcagcggttgctctctgcggccgttccagggccttgggcaccacagagcctcttcgtcttttcccgcgggtcgggagcattgggcgacgctggggctaggagccgcggctgctgtcgcgcctggagtctcccttcttcccgcgagctcagcccgcgctggcgctggcgctggcgctggggctgagctggccgcccgccccgagccctgcgccgctcccgctcgccggcagtcgccctccgacgcgggctttcgctggaagtagaaagtttgggctcctgcgtggaaacttctccggcccaactctcccggcgtagcagtgggggaggggaccggcgagaggggaggaaggaaggggggaggaagggggagacctgtctgaatattgcaataaaaataaagcgagaagaaagaagcggactcacctttatgaggcatcctttctggttgtcacagcttctgtcaagagttttgtttggttggggttttttgtgctgctgttgttgcttgaagaccacaatggtttgaaatgacggtgttttaaaggagttgctggtgagagttttctccacggatgttgctgggttggtgtgtgagagcaattctcagattcctgggaaggagacagagattgacaataaaatgggctgtcagcggctggagagtgagagataaagagtgtgggtgagggaagtggctgcagccagcacacctatgctgattggtgatggctcaagtgtgttaatgtgtgtgtgccggcgcccggcctcgcctccaccgctcctcactggcccattagcgaagcctgacctctgtcatcatcctccagcaaaacacttcctcctgcgcctgaaccagagcgggaaatgaggccgagccacggttcccttttcaaacccactaatcactccgcaacatgcaaatgcaccgctcgctctcacacaaaatattgctttatgcaaagcagcgccggggcctcgcgccagccgattggatgctccctctccccgcctggtgcaattggtccgtttgtttgaatatgaatacacttgttttcggctccgccggtgggtcccggctcctctccccggcgcagggcccccgagcccgggctctggcgctcgcctgcatctccccgctccgcgcacgccgagattcggcgcggcccgccctgctgccgcgaacttgagcggtcaagtgaaggtttctgggttgggggtcgcgcccccactccccctaagctggactcgggactcccagtcctcggagggtgcaagtttctgtgctgtcctttcttgccaactccaggacagcgtggcctgccgccccgcccccgcccgcccccaccccatcccagccggggccccaagacacagagcacagcggcggccgcaccccagcccacctggccccttggaagaagaggaaaggggcgggagcgtcactgggtcctggcagctccattccagctgcggaggccgcggcgaagcctaggccgagaggaggttgccgggccgagaactaaacgaggccagaggcctccccagcccaagcctccagggcctgtccaaatcctccaccccgctctccccgccctttcttctctcctttctcctttcggaagccgcggtgcgcagcggagcagaggcacagctctggctggagaggcccgagtaaacacgccacttactttgtgtacagagggttcttgtgaaaagccctgaagagtcctcaccaaacactcaccaacttctcccacgtgccatttgttgactaagtgcggctgcttttcgcagcgcccgagaggaggggaagccaggggagataagaggggagggggagtggaagcctgggtgggggggcggatgaccaatgctgggagggattctctctctctctctgtgtgtgtgtgtgtgtgtgtgtgtgtgtgtgtgtgtgtcccactggcgatgtcggtatgtcagcgtgtgtcgtgtgtgccaccggtcatctgtgtgtggtgcgtgtgtctccgcaccacgactccctctcctgggtctgctcagtccacggaggcagctccccttcagctgttgccagaaaaccggggaggaaagtaagtaaatggcttttctcttctgaccacacaccagaagtccatttgttgaatgccgcacgattaggacacacctcagtacactccaaaggcgcccctcggagcctgcagttaaggtgacaggagagcgagcggctgcctggtcctgcgctgtcccgagctctctcggcggcttcgggccacggagccgggaaggagaaggaaggcctgggctgctgtacacaccccaggacagggcgagggggaatagggctgaagagctgaggcagggaggctgaaatgaagcagccgaagggtacgctagactcttcttgacttagggaaagtgctgaaagtcagagctcatcaataaaatctgcgcgacctgaactcgctgctgactggccgcgtcgccgcagcccctggcagccgggacagtgaggacgctgcaagccgccctgggccgccgggccacatgtgggcctcaccctctcgttcctgcctgggacccagcagccctgcgaccaaggagcccgggcagggctcccgggaagcaaaggcctccccggccctagccagaggtggggtcgcataaccctctcccctccccgggctggggagggctgccggctctaacccttccccgggagctcgcagcgccgggaggaaacctgggtcagaggtgaaggaggtggcgccgggtgtccaggtccgcggcctcctgggcgaggtttcatttcgcaggagcgcgactttcggaggatgccggcaagtggggccgcggccctgagtcccagaccagcgaaagtcggctttctctttctctctccttttactttccaagcgagcattaaagaagcttggactcaagactcaagtccgctgtgcatgagcgagggacttgcgggggggcgggggggggggaagtgattctgtccgaactggaggcgagtatcatttttacaacctctcaattagcgaccgagtggattagcaccttcttaagctttgcctcggaaagaagcagccgtaatcttgttgctatttccccccagggcactggctctttgaatcagctccttctcccacccctccaacccccatctcgctgcggagaaaagttttaacaaaaaatcagaaaaggcaaggagcgaggagtgaatgccactgacgtcattgggtggggaagggggctccgggaaagactcctggaaactcctccgcacaaacaaaaaacaaaaaggacttggctgcttcccatgtgtcaatatttggggaggggagttcaaccccagaatgaggccgagttttcaaagtttaaggagagaggggtgagagtgagatttcctcgttctctctggactggtctcaaggaaggtgggggtgctgttctacctcgtggggagcctcactccctctgccaagtaccggctctgggggcgaagcggcctaggggtgtgggggccgagactgaggtgcgggcgcggttgccagaggtgtgtacaaaaccgagacaactcgcaggtcgccattttaattgcggctaccaacacgcccgaggcccacttgctgccctccaagacgcgggggggcggcggggattgcgctttaggttctgtctcctttccccgcctccccacaggcccctgttcccccctaccctccgccccctgtggccagagggaggacctctcaggccggcgggtgcgttcccgcgggggccgccggggtcgtcccacccggtagcggggctgtctgcgtggagggagtcccgctgggggaccgtggctcgccagagcctgcccagagcttctagccagtattgatgcgtcaacatgaggtgaggcaagcatctcacccgcaccgatccctggcattcccctgtgcccaccccatcaggccttcggggaggcaaagaagtgcccacttctggggggaagtgcctccagctcccagcttcagaaccaagagcctcccatccggagttctgacagttctgacacctccaaactctctctttccccggtcaagcagaggcgcagcgccggcgcgctggaaagggtgaagactggcattttttggagaaggaaagtcttggcagacacctgcgtcactttgtagtgccccaaacgtctctctttttgcagaccctgggaaggtgggatcccttgtccgcggagctggcaaacgggtccagtgagccctaaaggcaaaggctcccatcccggccgcccagtccctggtgcctcccccacttccaggcctttgtccctctcctttctccagcaacctgccggttcccgctaacccggcagcctcgccgagcccagagcctagaaaagccaagaagatcccagagccgccccgtggcaccttcaggctgtggccactgctcggcttggggggaagccgcggtgccctcgcccttcctcgcctcctgccaaatggccagtgctaggggctccctgggttcagtcctcagtcctcttccgttcgctctgggaggccagcctgtctctctctctctctctctctctctctctctctctctctttctctctctgtcttctccctgcccacccccaaaatacctttaaaataacattgtccagtggagtctcccagcaaagggattcctagcagcccagcgggtcagactcccaaggctttgcctcccagtccctccatgctgttgtccagataggagttaggtttaaaactcctgacatgtaggacaactgaaatcagcggcactctccgatttttgcaaatagggttcctagaaaagtttgctttccatttcatcaccctgtgacgatccccccatctctcttttccctgtaacctctgcccccaagaggcaagagttcagcttcaaaggaaaagcaagcaagtcaaggccacctcagtcccttctccctggatatcccctctctaaaccgctgcctattctaaaggccaacgacccggtcctgcgatttgtcccgttgtagacctgggaacaggcaggcgggaactgggggctttactgggggatttgaggctggggagggggagggagcaaatgtcatggctggctcgctcaagcatccagggaaccgaagctaagcgcatcctgacgggcttttaaaatgacattgattaggacaagctgttcccaaccccagtaagagttaatctgcctgttaatcaaggcactaaggggctcaatgcgagttttattagcgacaggagaacagaggcggcagccagggatcaaaagccgggatcccatatatttgtcagcgctatctccaaaaaaaaaaaaaaaagtattttcaatttgaaaacaattcggcgcttttcgtcacttcctaacccagtctcacagagggtgacttccaaacctggctagcggggaaaaccgctgcccgggggacagaggggctgacaggaactgcgggttggctcagccgaatgcggccggggagaatttaagaattctcagcccgcgcggcccgatgcctctgattcctcacgagaggaaagggaatgaaaaatgaagcaacaaatgacaccacccaggctggcagccctcgttcccggccagaccccgctcctcaggcccggctctggcgccgggtggcgtccagcccctgcacgcgcggcgcggcccgcgggaaagtttgtgcagcgagagtgactgtccttccgcctcgcgcgcgctgcccccttctgccccggaggggcgttgggttcccttcggttttcctttccaattctaaaataaataaataaactccgggccctggggaaatctgaatagtaattccagtcatccaaattctatgagagggtctgaggaaaaaaagacaagcctatcacgggcgccctccgatcacgaagggcacgggcatgagaaggcgacagaggaggtcctcggctcgccctgggcgcggagcgaggactctggtcagaggtaattatgtcaccgcgttttctcgccgtgacagccgaataaacacgatctccaataaacatctctaatgagggaggaggcccgaggatggctgggtttgatttatgactggaggagaaggtccacttcccactgcgaagcaggcgacctgctcgccgcccagctccagggagaggaacccgcggaggagaggatcccggcccaggtaaggcgtgcggccggactgccactgcgctcgtcccccgtttccaggtgaggtgagcagggggcgccaccgctcggagtcgggcggaggtcccaacacctgtcacaggtgactgagctccgaaggtgctcccagaagacctagaaagggggcgcaggagcgcgagtgggagtgggggttgggggctagccggggcctggcccagaggccgccccaaactcccgggcggggttcttgggtgccccgcctaagccggcctgggcgtctccagctgcttttagggccgggctcccaggactttcgcccggctgaaccacaagttagtctaagtttgggtcgtcccttccctgactcactaaggggacacttccgggccccggctctggccctccaagggccgcagggtggtgggcgcttctctttcccgggcttggcggcccggctcccatggcgcccgcgcgcttcccgccgaggcagccagcgcagcgcccgcagtaaccggagcccgcgttctagctcagtgagaatcgctaattattaggtcttccgaagtgaagctcaaatcacacgctgggagctttacgcgctgcccagctctgtcggccgcattctttcgtactccgcgtctttctgagaaacgaaccccatctctagactttgttgcggtccagccatctgcactttgcaaccgcgggaaacttctgctgcacctcgcccgacccgcggcagggtgtctttaagcgctccaggcgcgggtacggactttcccaagcgtggatgtcgtgaactgcgatgcagaggaggtctggatgcaaagtgcgtccccacctcctgcatttttcgcggtcgcgagtggctttagcagacagcagcagcagactcccgccccctactcccagctcagggccggactggaagtccactcttaggagtggaacattttgctacttttgcagaagagcacactcggcaaagacaagtccctcctccaccccccttcctatccctccctcagtaactcgcttccatctttgtatgcctccttttaaaagcaaaaatcaagccccggggccacttggggcgggctttgatttggggacagcagtcgctggcagcggagaggccccgcgggccccgagccgggccggggccggagcccgggcggttacctgggagcggagggcggggaggcaggtgagcctggcagcgccggttcccacacttctcaccgccgctcggcaggggaagtggcagatctgacagccgcgttctacgcgaggacctgccccagagtttaaatgtcaatgataagaaaagagggtgctcaggcaggcgctaactttccttaatatccacgccagcgccgtcctcattggctgcccggcccgcgtgacgtcatggcggctagagttgggcacagctctgcgccgactagttttccggccgggcgggagcctgcttctccccacccagggtccggccggctccaacccctgctttggccttccttggcccggcctgtgactgctctagcccggcccggtccagcctgggccgccgtcctgtatggcgtagagtcgatccccaggaaactagtcttgccgagtgcgctcctccgcaccttcgggcactagggccccaagatctctgcccttaggctggccagctacctctctgggtaatcaccctgtcccctcctccgatccccaagggagtcccttcatcggagagacccgaaggccgcgccgggatggagaggcgcttttggcaggaatcatttttaggaggagttcgaggctcgatgagtaccctcaacctggccctcgagcccgcaagtcactagctgggcacagacgggggctccgggaagaggacatgcgacccctttttcagggcctaggccaaaggtctctccaggcctgctgggttctcaagagggaagccctaaagggggcctacccgggcttccctcgccctctggctgaaaggctccaaccacattagaaaatgtaggtgattgtatttatctttgactttgaattaactgttgactttgtgacttagaggaggaaaacaggaaaatcccagattctgaagtcaatactcatagaaattggggcggggtctgcaggacactgacttgctggtctgtgcctgtttttccctcacaccttctgtggactgcgagatggcttagcggagctaggcctggctatcttggaatggagatttagaccctcgttgtcattcccgtccctcatccctcaaaacaggaagcttctcaactccttcccctatgcttccatctggctctccaatttgaaagtgacagtggtggggcccggaggggcaggggtcacttgaggagtttgcgggagaggaaggggcggggcgtggaatttcctttaggcagctcgtggagacccagcctgggtggacccgggagtgtgtgtgtagaagcagggagggggacgcctgggccggagagggtcctagggccagtccctgcgcgccttgatccgggcggcggctaagggagagccgagcacagatggcgccgaggcggaggtctagtgattcccgctcccgcccctggcacacctggacaggtgccgggcctcgcaaccggccaggaggcagctccaggcagcccgtctgcccactcctcttagcccggacagctcctagctggacttgattttttgtcttgctcagcccgtcgaggactggagggcagagtaggggtgggagtgggggtaggggtagaggtgggggtggcggtgaaggtggggaggagaatgggagctttggctgagaagttt

SEQ ID NO: 432 - DNA, 73473 bp, Homo sapiens
  source 1..73473: mol_type = genomic DNA
cctttaaaataacattgtccagtggagtctcccagcaaagggattcctagcagcccagcgggtcagactcccaaggctttgcctcccagtccctccatgctgttgtccagataggagttaggtttaaaactcctgacatgtaggacaactgaaatcagcggcactctccgatttttgcaaatagggttcctagaaaagtttgctttccatttcatcaccctgtgacgatccccccatctctcttttccctgtaacctctgcccccaagaggcaagagttcagcttcaaaggaaaagcaagcaagtcaaggccacctcagtcccttctccctggatatcccctctctaaaccgctgcctattctaaaggccaacgacccggtcctgcgatttgtcccgttgtagacctgggaacaggcaggcgggaactgggggctttactgggggatttgaggctggggagggggagggagcaaatgtcatggctggctcgctcaagcatccagggaaccgaagctaagcgcatcctgacgggcttttaaaatgacattgattaggacaagctgttcccaaccccagtaagagttaatctgcctgttaatcaaggcactaaggggctcaatgcgagttttattagcgacaggagaacagaggcggcagccagggatcaaaagccgggatcccatatatttgtcagcgctatctccaaaaaaaaaaaaaaaagtattttcaatttgaaaacaattcggcgcttttcgtcacttcctaacccagtctcacagagggtgacttccaaacctggctagcggggaaaaccgctgcccgggggacagaggggctgacaggaactgcgggttggctcagccgaatgcggccggggagaatttaagaattctcagcccgcgcggcccgatgcctctgattcctcacgagaggaaagggaatgaaaaatgaagcaacaaatgacaccacccaggctggcagccctcgttcccggccagaccccgctcctcaggcccggctctggcgccgggtggcgtccagcccctgcacgcgcggcgcggcccgcgggaaagtttgtgcagcgagagtgactgtccttccgcctcgcgcgcgctgcccccttctgccccggaggggcgttgggttcccttcggttttcctttccaattctaaaataaataaataaactccgggccctggggaaatctgaatagtaattccagtcatccaaattctatgagagggtctgaggaaaaaaagacaagcctatcacgggcgccctccgatcacgaagggcacgggcatgagaaggcgacagaggaggtcctcggctcgccctgggcgcggagcgaggactctggtcagaggtaattatgtcaccgcgttttctcgccgtgacagccgaataaacacgatctccaataaacatctctaatgagggaggaggcccgaggatggctgggtttgatttatgactggaggagaaggtccacttcccactgcgaagcaggcgacctgctcgccgcccagctccagggagaggaacccgcggaggagaggatcccggcccaggtaaggcgtgcggccggactgccactgcgctcgtcccccgtttccaggtgaggtgagcagggggcgccaccgctcggagtcgggcggaggtcccaacacctgtcacaggtgactgagctccgaaggtgctcccagaagacctagaaagggggcgcaggagcgcgagtgggagtgggggttgggggctagccggggcctggcccagaggccgccccaaactcccgggcggggttcttgggtgccccgcctaagccggcctgggcgtctccagctgcttttagggccgggctcccaggactttcgcccggctgaaccacaagttagtctaagtttgggtcgtcccttccctgactcactaaggggacacttccgggccccggctctggccctccaagggccgcagggtggtgggcgcttctctttcccgggcttggcggcccggctcccatggcgcccgcgcgcttcccgccgaggcagccagcgcagcgcccgcagtaaccggagcccgcgttctagctcagtgagaatcgctaattattaggtcttccgaagtgaagctcaaatcacacgctgggagctttacgcgctgcccagctctgtcggccgcattctttcgtactccgcgtctttctgagaaacgaaccccatctctagactttgttgcggtccagccatctgcactttgcaaccgcgggaaacttctgctgcacctcgcccgacccgcggcagggtgtctttaagcgctccaggcgcgggtacggactttcccaagcgtggatgtcgtgaactgcgatgcagaggaggtctggatgcaaagtgcgtccccacctcctgcatttttcgcggtcgcgagtggctttagcagacagcagcagcagactcccgccccctactcccagctcagggccggactggaagtccactcttaggagtggaacattttgctacttttgcagaagagcacactcggcaaagacaagtccctcctccaccccccttcctatccctccctcagtaactcgcttccatctttgtatgcctccttttaaaagcaaaaatcaagccccggggccacttggggcgggctttgatttggggacagcagtcgctggcagcggagaggccccgcgggccccgagccgggccggggccggagcccgggcggttacctgggagcggagggcggggaggcaggtgagcctggcagcgccggttcccacacttctcaccgccgctcggcaggggaagtggcagatctgacagccgcgttctacgcgaggacctgccccagagtttaaatgtcaatgataagaaaagagggtgctcaggcaggcgctaactttccttaatatccacgccagcgccgtcctcattggctgcccggcccgcgtgacgtcatggcggctagagttgggcacagctctgcgccgactagttttccggccgggcgggagcctgcttctccccacccagggtccggccggctccaacccctgctttggccttccttggcccggcctgtgactgctctagcccggcccggtccagcctgggccgccgtcctgtatggcgtagagtcgatccccaggaaactagtcttgccgagtgcgctcctccgcaccttcgggcactagggccccaagatctctgcccttaggctggccagctacctctctgggtaatcaccctgtcccctcctccgatccccaagggagtcccttcatcggagagacccgaaggccgcgccgggatggagaggcgcttttggcaggaatcatttttaggaggagttcgaggctcgatgagtaccctcaacctggccctcgagcccgcaagtcactagctgggcacagacgggggctccgggaagaggacatgcgacccctttttcagggcctaggccaaaggtctctccaggcctgctgggttctcaagagggaagccctaaagggggcctacccgggcttccctcgccctctggctgaaaggctccaaccacattagaaaatgtaggtgattgtatttatctttgactttgaattaactgttgactttgtgacttagaggaggaaaacaggaaaatcccagattctgaagtcaatactcatagaaattggggcggggtctgcaggacactgacttgctggtctgtgcctgtttttccctcacaccttctgtggactgcgagatggcttagcggagctaggcctggctatcttggaatggagatttagaccctcgttgtcattcccgtccctcatccctcaaaacaggaagcttctcaactccttcccctatgcttccatctggctctccaatttgaaagtgacagtggtggggcccggaggggcaggggtcacttgaggagtttgcgggagaggaaggggcggggcgtggaatttcctttaggcagctcgtggagacccagcctgggtggacccgggagtgtgtgtgtagaagcagggagggggacgcctgggccggagagggtcctagggccagtccctgcgcgccttgatccgggcggcggctaagggagagccgagcacagatggcgccgaggcggaggtctagtgattcccgctcccgcccctggcacacctggacaggtgccgggcctcgcaaccggccaggaggcagctccaggcagcccgtctgcccactcctcttagcccggacagctcctagctggacttgattttttgtcttgctcagcccgtcgaggactggagggcagagtaggggtgggagtgggggtaggggtagaggtgggggtggcggtgaaggtggggaggagaatgggagctttggctgagaagtttccgcaggatgttcttacttatttacaaacattctccaaactttctttcttcttcctaacgccctgggcatcctgtgttaaggcctaggagcgcccacctcccactggccactctagtctgggcctagaccttaccatggtcctgtcgccctgctcggctgggaagggatgctaagagaggcatttgttctggtttccctgtcgccgtcggccatctccagtgacctagtttcttggtaagcccctagctcccctccaggacctggcccagcctccagcctcagatgtcctgaggtctcccagactccgccgtccgccttggcgtgtgggctgcggataggcctcggacctgtgtaggccttcctagctggccagtttctgtccgggtctcgctccccacactgtaccaaccctaggccgccgagagggctgttatgggcttgtttggagtccaggccattaagtgtgcgcaaatccctgcaacccagcagggtgctcgagagcgactctggaaacgccacggcccccgcctgcttatctgcctgtcaataaagggcgcgttcgggctgcgcgggagcgccggtggtgcaggcgaggcccgaactaggcccttccgagctccgggccaacgcacgagccgctctccatttgtcccgggcaaggaggctgggagggagggagccggctctggggtcgccgagggagaaggtgcgggtttagccgctgcctcagctggattcttggagaagcgctcgacctcggagcactctggagaccctaccagaaatctagtgctgggggctcctctccgcgcctgccaccagccttggaggaagctgggcagggccccgtgtggtgcccagcctacgaggtcccacctcgcctctccctggcagaggcatcctctctaggccacactggctcgcattgcgggaagaagggcaccgcgggcggcccgggggcatcatcgacgactcgtagagccccaaatgccgagtgctacctgaggcaggctgtagctggggtgaaaaggaccggaagcgggaaagaaacctcttttctttcaggcctcccttcagcccggggtagcacagactgcaaatttccgacacctagggcagctccaggctctgattctccaccgcacagtgagcgagctcggcagccgcccagtctgcgtaggctcccaggccagccccggccccagagcttccccatcagccagcagaggctgggtggagagcctggatgggcgtgagaggccttgaagtaggggaagtagtggagagagagaaagatagagaaatcggctcttggcttgaactgttgttcttgtcgaaggtatgttttcccctcccggcctctgtcgcttttcctctctccccttaactactttatgcaaataaagccgcttccagactggaggagcccctaccgctggatctgtgctaccaggtgggtgggaattgatttagtatttgcctttttattgagaataggcactgagtctcccaccaattataaaataaaaatggattttcctcttaaaatttaattttactcaatctggaagataatgcatcctgttaatttctacaatatttttaaaaaaggattccagggtgagcgctaacttataaaatggtttaataaagcttttccatatacaaattaataggagaggaaaaagcccctaaataattgatttaaaatactgtgtattatttgagtgtcatttcaaatagctgtacaagccagtaatcaatatatcatctaaggaatctaatttactgggcagtacgtgtggctcttgctcttccttccctctccacttcctcccctttaaacagaaaacttgttttaacaagatttttattttaaatcaaaattgaaggaaagttttgtgaattcgagcgtcaaaaaggggactatttagcaaagataatatttgccatctcttcaccccggtctcaaggattgcataatggcatgattatgtgcaattctgtgttttctctgctattaatttattttcctgctctcatttaaataactactttacttttttctctcttctattttgccacaccataaaaagttttcccggacctctgtggaaaatctccaatccttccagttagctttgtcacaaacaaacaaacaaacaaaaaacaaacaaacaaacaaaacaaaacaaaaaactctacaacaatcaatttgagaaaactctgctttttctttccttttaaacattttcatattaagtcagtttgtggcaccatgtttgatttctttctctcccttgtccgggtagagatggagacattagctgaattccctgggggtgattggatgcaattcactgaaagtagacaggcacgtcctggatgttagaaattcactttttctcaacgtgacaaggccggcttcgatctacaattgtatttgaatgggcaatgagcggaaagatctctcatcattaagcttgcttctactttagcaaaataaggagagccttcatttgcacacaaatgctcataaaactcggattccctgcaaccctttaataaaaaaggattgctgcataatttaaattggaggccaggggaaggctgagagagggagatgagggggtttcaactgagtcccctcccttcccccaaaaggtccatgtgatcgagttgacttttttactttaaatcttaaataagatgtgagttgtaacaagaggattggcacttactccgtgacccttataattggattaaatatagactgagacgtacaaaaacacaccaagattgacacctgccaactggacttccttatgattgattgtgatgcttcgtgctggcaacaataatgaaataaattgtacggataaaacagcacatttgtcatttccgtgccatgagtgaggaagtcaacgagttaggcaagctgttagctgacaggcgcgagcgggaggcaagctaaagagataaataaggattccaggcattgacaggacaaattataacttgtcacaacctttttaaattcagaagttttcaattaacatatatattgctgttacatataagataagggggcactgacgtaaacacgcgtggggtgcagggacccccccccccagtgccaagggtttgggcatccgggcttgggcatccaggcctctctggctctgttctcccattctggcaagccggagggcacccaggtttgcatggccagcctgtaggcccggggctccgtaaggtgggtgagagtgtgataggctaagtgcagctgcttcttttgctaggagccccagttcacaggtccagcaccctttcttcatggaagcaaagctcccagatcaagggagaggctgggcgaggcctgggcccaggtctggaaggacaagtcctgctctgtctcctggagtcctatgtaaggagtaagagatagagggcagaggctcccccttttgcgctccaatgtcttgccctcataggaaaatctgagctgctggacacaacatatcaacaatggccacatcctgtgggcaggcctaggccactgaaacctggtgtggcctgaggctgctcctgagctctcaactccttctctgactcaccggcccagtgccgccaaggaaccggtcctgtgtcctacctaggaagagctgcttttccctcctcagactttgtttctggtacagttcccagggctcttccttgacccatgggtaggaacgagtttgccagtgggtccttgataacctgaggccattcacctagagcaagtgagattttcagaggagcaaagcgctggagtcaccctgtgaggctgcaagttaggggaagccatgagatttctggggaagtctaggtgttgtgactgtgactggggactgctgtgggtgaggtttgaagagtgtggagggactgtaaactctgcaaccatcttcaccccaaaggaggctggctttttggttttaaagctaacccctatcctaaagcagaatctagacttgcagggcctctctgaactcaggtcccagcctccccgcaaagtccagctggaaaggaaagtttgggcgggaagcgagcgtccccgggtctgaggctgctgggtggaaagctggcctaggagggcgagtagggagcaaaatagggcctggtccttgcggggccggggagctagaggccgcaggaagctgggagggccctttccaggcaggcagggcagcctcctggcgcggcccaaggcgcgaggcagccgctggctagggaggtccagtctcctgcaggccagggagggcttcctctgggtgcagccgtctccctccgctcctcagcttggctacttggtgctcggaccccgcatcctagtcctcgtccttgtgggacagaggccaaccttgctgtcgaggccccaatatgtcaccacaaacactcccagaacaagagcatcaaccccaagctccagaacttctggtcttagcctactggagcctgccaccaaattaaacaccgcgaaggctttgaatccctgcaaagacggagcctggaagaaagggagggaggaaaagggaggaaaaaaaacaagttacatggaattagttggaagcgggcgcattccccagcgaccgcagccattaacattataatctcaaacgccattttttatgtaacactattgttagtaaatcaactcctcaggtcctcagagacgctgacccctggcaattcagtgaaagtgtaattatctccccgaatcttggacagatttaagagattacatttcaactaaatctatatcaatgctaattccctctctccccccagcctgcaggtgctaggcacgggaaatggcgtcaggccccagcagaacgcttcacaaagaggagagggctagctgtgtacagggccaaaagaaatgaagccccacataaaattacacctttttttttttgctacaaaacctggttcttatatagcaaagttaaacaaagcagctatgctaaattagcgttacataaaggcgagtttaatgctcggttacagtcaactggtgtatctctgatggctaattgtctatcaaaattaaagagaaaagaacaaatgattcgttataagaaggtgttaaaagcctcaacaaaaggacatttcacaaatataatatcggcagctcccggattgcctgcggggttgttcaggccccgggcctgcacagctatgagaagtggggtgcagggtgctatttgcccagcaaaagctcatttcctcccaaatgagtataatgaaaacccgagaggcgatattagtgtaaagatcgggattagtccaaataggagccgcggacttgggcttcaaaggcgacccctactctttttgcccagtctgggggcggagggcgctcgaagggatacttcaaggacaccacatccaacttgtcgcagccccacgttcaggcacaggagggagcgaacattgggcagagggtaatttcaacaaaggacggcaggctccggggatcccggcttttccctgagttctctgggttggaaggagagggtccgggctctgtcggaggagtgggtacagcccagcacatgcttttctgacgcgcagcgctggcctggggagtgggtgcagctgctgcagccagcccccaccccgccccaggctgggaaggacgcagagtataatacgacggcccccttccccaaggggacactagatccagagctccaggcatatttgttgttcaaagttaattatacctgaaagcaaccaaaatgcgcacgccaggcccacggaggccgattgccgaccagcgtagccggcccgcagcgccagagaagccgctcactccggcggagtctctgcaagagaatctgaggctggggaataaaagccgaaactaaatcaggcagcaagagtaacaaaccatctggaaaatggacccacggagccgcaagaatgtactttttttttttatccttgacaacttgtgtcctaaagaaagtgtattgaagataattgaaatgattacaattcattgctgcctgactttgaatatgaacagtcacataatgacatccccgccacacaacaacagtttaatttccattatccgacttcgggatcctagcgccagccgccggggcaacgtggcgctaatgcagaaatcttggctcctgcctgcattattcatttcggggacgtggggatgggataggagtggagagtgggtttcttcccctcccccgaacttattctgaaaatcccggggaccaatggacaccgaggaaccgaaagccgagagaatagctgtcaaggggccactttgaccgacggggctgcggtcgacggcgctccccggctgtctttttgtcccaggggttcccaggcccgcagggctaggatcccccagctcccaccctagtcagtcccagtcagggaggacctaggccagggcctcctcccaaggctgtcatctggcggggcaaacgctcttctctcattccttcgtctcccttccagccctcgcatcctttccttctttctgcttcagagctctcaggctcgcgtgcagggcgggatgggcccggatcgggggccccttcgcagatttgaaagttgcctcggccttgatcttctcccagcctccctgctggggactcacccccacatcccgctaccccccggggaaaagcgaagaaagccagagtctctttgcacggcggggacgctggcgctcacctctgggcgcggcctcggtggagcctcagggccagggcggggtgtggcggggtgtggcccggtggggtgagggagggacccggggtgcaagccaggccaaggcctcctcagtgcgcaggcgccgttcgggcccgccgccccctcccaaggcgtggggtcccggggacagaccccgagcccctctctgcgcaactaccgcctctaaaaaaaagaccatctggtaattgtctttctttagatcttcccttaattatgcttttaattaaagatggttcaaggcaccggaccacatgaagggcagtaattacaaattacattacaaacccgacagacgtagcaggatctgctgggaaaaaggtaccggaataaaaatttgactaaagtttgggataaattaatcggtggcttgaagaacagtagcacatttctgattatgtaggctccagccaggatttaagttttgtgtcatgattgttttcatatttctttgacatctattgatttggaggcagctgcaagcctttgtcacaggagagaagagcagtcacaatatattagcttgatggcataactcgaaccggagaagcgaggggagcctgagtgactggggcgcacatgacccccctcctggggcctttgggctcaacccttacttttaacttgttctaacaggaataatggagtagtactactaatgcatggtcagaaggggcttttctgtctagaacgcaggcggcgggagttgcaccgccacagcccgggagaccaaagagtctccactccccgctcccggcgcctcctcgccgaccggagccccgagcccagtgagcccagccggtcccacgtcgagaggcgctgggttgggagaagttctgctggtcgtgggctcggcccccaggcgccaggccgagtgcccacctcggcttctttagggggcctacagcgggcagccgagcggctggcggacccggagcttgggaggcgaccgccaggctggtgcccggcctgacccggcgttcgcggccgcccgctcgcccgccgcgggccgggagcgtacaggagtgtgacgcagattgtgaaaacagaagggagggagttgggtcatttccttcgctaatcatcgccccctcctgctcctcctccccacccccatcccatcctcgccgccacccagcctcgaactctcttccttgccagagtctgcctcactttgagccagtggctgcactttatggagaaaatatatgtgcccatcactcacccatctatttgcagcgtccatggagcgcctcggggaacacgcatggacaattaaacacacccacttacggcgggatgatgaggctttctgttaaccacatgtgttcagaaatggatacagccctaattttgacacggaatgcagctaatgcaccttgctatagatgtacgtccgttggaaaagtgtgtgatgggcacctgatctacaccaagagaacagggctgtctgcagaagacccagcggcctgacaccttttcttgttgccggggaaggaaagtttttcttttgatttgtcctctcacgatttttcccttttcctttgcattacagtttcagagaggaatgtaaatattttgactagacctctgcaggggccttttaaacaccaggcacaatcatctgtggaatactgtagttcatactttcaaaacttgggtgttaaagagtctgtcttgctgaggaaacccatagaactagtggcgacctttcaactccctatttgtgtgatgaaatgaagtatgccctagtgattgtcgaattttaaggacttgttctgtcactgctactttccgatcgtttgcagggaagaaaaatcaatcaaacagacctttgatggggttgtggcaaggtcacatttcactgtgctccaggcttacctcttcttaacgcccctccctgctgtggagcgtgtgcaggtagtatgcaaaactctagaaataatatttgaaaaaattaacaccttgtttatctcttctgtgtatttgatataggggtttctttcttttcctgttttggtgtttaatacaaggctgatatattggaacagaatgcagacttcaaagaaactaaaattaggaggcaaatagcgtcaaggtttcctcggtttctgtatgtagtacaaatagtatagcgtcttttcatccaaaaagaagcaaaaattgccaggaggcataaagcatctctgaatatccgttttttttaaagaaacaaacatttcccaaatattgatgtacgcatggttttatagtctgaaaatatttctaggcacaaatatggcatacaaacattcgtttcaactctgtcgttgttgttaaaatgacagtaaattatagtttattttaagatacctccctgttaatgtcagttgaggttattttagggcctggatgctctaggaagaccacctaaaatgtgtttatttctctgcccaattcacctatagtgtaaggagcattttattttattttattttattttattttattttattatactttaagttttagggtacatgtgcacaatgtgcaggtttgttacatgtgtatacttgtgccatgttggtgtgatgcacccattaactcgtcatttagcattaggtatatctcctaatgctatccctcccctccccccatcccacaacagtccccagagtgtcatgtaaggagcattttaaataaaatattttgggcatccttaagtccttttttaaaaatccaacattctacaattgtgacaaataggctgaaaaattttgttttgtttataccaaattcattttaataaagcatttgctgagattttaatacaacaaatgccaacaaaatgcatcagagtagaaaaaagaaaatattttcagaattgcctataatattgcttgtgatcctaaattttttgatgcaaggaacttgaatttttcagctaatattattctgttttcttattctgtgtttctattagaacactcacctatgctctgcttcccttgctgtcttcccatagcttatgtgtgcactatgaatttcaataaatataaattactgcttaaaagagtaaagaatggctactttatgactcactgttctctccttacaatctgctcaaaaatcttttttacaaatcccattgtagctacttcccctcaattccacgatgaaagtgaatggcaaatgccattcaatttagaggaactcaagcacagagaatataaagatgttgttcaaagcctccctcaaatctatctgtaggcttacaaacaaaatgagactggaggcaacatcagtacacatctccgactccatatgaggttacttgaagctttggggttcactctggaaacagaagacatgcatcaaggtatgtgttccttagagactgacaagcaacagtggacctcaggagaaataaaacaactcatgctctcaactgcctctgatttgcagacaaggaagagttttctctaattttttttttttttttttttttttgcctgcattactttttctgtgcttggtggctaaaccagagagcagtctgcaacattttgcttttggggatttcctgtggctttgccacattccctggagaaactcataaagtcctggagtctatggagggattacagagagccacaaacatcattcttcctctaatccatctggggcagatacagtattgataacaacctttctgttacttgacagtttcagaccattcagatgagaacaaataataggaatttggtagtggaggtggggaaaatagaggcaattggtatagtcttctgagttgaaaggactggtttccattccaaaatcgtggaaacaagtacaaaattaaacactttccattcaattctttggaagtgatttcttctgtctttggttattgtagtgcatttgtgttggggaattgatgcatttatttactttgtccctaagacaagacagtgctcagttgcttgcattttgtagcttcagtttgtttggctctcccagcttgaacctactatgttaggtaataaggaagcccatttgcattagataataagaatcagggacaaggcagacacaatgctgattaaacaagggctcatatcccattttgagagctccctgataaccagcgccacaatcacattggtaggtcaagcaaaaatctgaagataaaatcaatgtcagttttctgtcttggtgacagacagcgacccaccagaattatatccagtaaatcctgttatcaagttcctcactgtcgttgatgaattcacttatgctatgggtcagagattatgctgtggccaccacctatgtgatgatgtctacggcatccctcactttgacacagacttacacagaacaatacgctaacaattatagctgtccaacttcctggtctgctttgtaaggtaagggcagtgaagacactgggaatgttcaagtggaatctggggtgtggggaagaccaaacctgcatgaaggagtggttagggaaattaacttacttcccaaactgtatcagggccagaatcatcccagaaacatttattttatctattggttatttattaaataatttaaatatgattacttgtcaaaatgaaagtacattcatgtggttcaaaattctgaagttcagaaaatattttgtgaaaattcttcatatccagtcatacagccacccccttcttacctattgaaagcaaccaacactatcagtatcttatgtataggggagctttaaaaatatggaattccaaggcctacttaatgagactctttggagacagaggctttgctattggtgtttaaaaaaaatctttccagataagtttgttgatatgtgggcacttaagtgatttttagacttctttcaaacactgagattttatggaaatatataatgtaatactactcgtcccctacgttcctacaatgtgtgtaaagtattttcaaaactagtatatatttttttctttttgcaaccctgtaaaataggtattattttctgcccccttcccatttttcagagaatggaaacttctgaaaaactctcagaagtttggacaacttgacggaggtaactcagctagtaaacagcagggtcaggtagcatcattcaaggccatgctaggacctaagtgcttttactttgagctttaccccacatcacatcaaatgataacatgacccgtacttcaacataattatttgctataaactgttttaaaataattttgataaatttgaagttcattaggaatgaattattcatttcatttttatgattaaactttactacatttatacatgacatgtaagttgagttgcagctggtgtgttgacatgatgtcaacgcttttagtcatgtaaacatttatcaatgctgactctgtgtgtgtatgtgtgtgagacagggtgttactgtgtcgcccaggctgtagtgcagtggctgtaatcttggcttactgcaacctccacttcaaacgaccctcctacctcagcctcctgagtagctaggactacaggcatgcaccaccatgcccggctaatttttaaatttttttttgtagagatagggtttcgccatattgcccaggctgatcttgaatttctgggctcaagcgatctgcccaccttggcctcctaaagtgctgggattacaggagtgaacgctgcacctggccgatgctgactttaaagttgctgccatttttttttttttcatattttggagctactaattttggggataagggcaagaattcaaatatcttttcaagcttttgaggagcttgtaggttttaggttctatacttgaggtgcttgttttagttaggttaaggctaaatttctctaacaaatagccccagaaaaaattcagtggattaaagagaataagagtttattttcctttcatctaacagtctgaggtgtatgtttcagggtagcaggcagcttgctttatgtagttttccagccatctaggattctctatcccttaggctattgcctttatctgcatgaaccatagattcctccaggttctggttcataagtggagaaagtgcaggaggtgcgtccatggtttttaggtccatggtctaccttgaaactggcacacattccttctgctcacattcctttgttcagaacttagtcacatgtccacagcaaactacaagtagaattggtcaacccatattgacccaaatgcggtggtgacccacatgtagtgaaacaaccagcagcattcacaacaatgcataatgcagctaggagactgttacaataatccaggtagaagctgatgatggtagcagtggtatttgtgggagataactgaattctggatatattttaaagaatatcctaatagattggataaggctgtgagtcaaagaagagtcaaggatgatgtccaggttttggcctgagaaactagaagaacagatttctcatttatagaggtgaggaagactgaggaggaaatttctgtagaaaggcaaagaatttggtgttggatatattgggtgtgagatgcctattagaaatccaagtaaaaatgtcatgtaagagttgagcatatgagtctggagttttaaaactaaacactgaataaagtcaacaaggaaatcaatataggcagagaagaagcctaaggatcaagctttgggacatgttgatgtttagaggtctggaagatgaagagaaattgaggggagtccctagaaaggcaggaggataaccaggaaaggctggcacacaggagtccaattggagaaagcattttaggaagcggaacatgatcaacctttaaacaactatagtgttaaatactgtaaataggtcatgttggatgagaactgagaattgactgttggatttatcaatatgtcatggatttttggggaaagtgactagtaggaatagaatattggaataaaaacataatgaaaggagagaaatttgaggcagcacaagtacctataactatttcagtgatttttgttgcaaaggggtaagcagaaaaatggggcagtagttagagatcaaggttttttaaaggttgcatgaaaaaatcttcatgtttggattctattgggaaatcattcactagagaaggtaaaattaatgatgcaaggaaggagtggagaattgtcttatcagtgtccatgagaaggcaagaagaaataggacctagttcacaaatggaggtgttggtctacttgcaagcatggatgatccattcacaataatgggacaaagcagagtgaacagctcagatacagtgtagcaggatgtggtgaaggtgcttgttcttttctgattttctcaataaaattgtaagtcaggtcattatttcagaagatggagaaggagacactgtgggtttgaggtgaagagggaaattgggaaactcagctagacaatgggtgtgtgaaataacaggagacttgtacaaggtttttgggcatctctggggcctagtcggcctcactggtgtatacttttctctaggcacagctcaggtacagagtaggctgagagttggatttggttaggattgggctgttgcaaggagagacagtatgatgaagggagagaaagaggcaagggagttacttgtgtgtgcaaacgggttactccgtggaatctaaactgggtagaaaaggacgtgaaaacctgaggggataaagaccagtggagaagtgataggattaaaggattttagatttaagtgggtcaatgagttgttgaagtgatggagtgagcaggaaagatagtaaatgatagttggagagtgaaatggagatgaccgaggggtgaaattaatgtcaaagtatagcataagaccatgggagtgggtggtagctggagcaacagaggtcaaggaactgaaaagcaagggcactggaaggatcatagatattgaaattctgaagaattagggcaggggccatgctggaaggagggatggtgagataagagctaaagccttgaagaatgagtgggaaagacctgggagcctatagacttcagctaccagtgtgggatagctggatagccaccaatgtgggatagtctgatggcatgagagtcaaagctggaagattttagggaggaggaagaaacaggtatgaaagtgccagagaaggcaggccctgtggtttgagtgacatggagagaagctaccacctgagggggctgcagaggaacagcccagtgtcaggaagagaaagtgaaggtccctcaaagaagaggatagaggtgattgtgctaggacagactcgagggcacactggagggatatagggacagattagagcacttatggaattctatggaatcttgaaccttccaggtcctggttcatctatgaatgttgatatcttatgacttcaaatttactccctccctctgggcttctctctcttgcttttataggacagtcctttctggtcattcaaatcatttatctgtcctctctgccatccctctcatgtacctttcaggtcttccacttattctattccctccctccctccctccctccctacttccttccctacctccttccctcccttcttccctccctccttctctctctctctctctcacacacacacacatacacacacacactcacatctatctccgtgaacagaactttggcataaacttctgagcgtacggaaatagatttggctccttacattaataaataatagtatgcataatgaggaaaacatttaaatctaaacaatacagaacttagtaaggtaggaagtcagtttcccctactttcatttcagtcctaaacacatccttttttaagcagaatccatataatgtttattatataaccttccaaattatttttaacgctagacatttacgtacacacacttgtatatactcattaatggaataaaggttctggttttttttccggcggagggtcatttaacatagattatctttgcaagtcactgtcatattattttgtttttagcggacacacattatgccattgtgtgaataaaacattctgtagtgatggacatttaggttgtttggaactttttctattataaataatactgtagtatacttccctgtacatatccttgtgctaaaaatttggaagctagactcctacaactaaagttgctgaatgttacactgaatgtacattttaaaatttggctgacactgccaaattgtcaccctccccaaatcatgtaccaatttatactcccactagcagtttatgagtgtgcttctttccccataccctacccagtaatttgcctccttctggaggtttgtaaagaagcaatctgtcagacagtggaagaggcaaatgagaatctgtgtacactgaatacacctgacaccttgttgaatcccagggttggttctgctgatctggctgactaagcagggggtcccccttctccccctctctctgggctccatggggatcccagctgaggaacggttgatgaggggcactggggtgctcgccttcactttgatttaaagtctgcttctcagtccactgctactcggggacaacatgctctgatggctgataatatgctctatttgtattctagctggatataggtattagagccaagtgtttattcatttccatcaggggaagtcttcaggcaccgggtgctcaccttgatctttaattttaatcacaaaatcaaagccctgctgtcatttcaaaggctcactcagacactaaactttagaaggtctattagtcctcatcccaaatgggtaggagaggtggatgcttccattacagggctccatccccattgccttttcccctgatttaaactaaggtgcaaaggaagagaaagactgctcactgaagctcacaaccttttaaagtaccaataatttgcatgaacaatgatgcccacttttgtttttaagaccacttaatagacttcatttcttaaaccaaaatcactggttaatctttccagactgagtcctcagaagggaactgctacaaatttattcagaggatttcaagcagtaaaaataatgtgcagttctttttaatgggtaataaaattccccaagaaaaatgaatctttctaggcatagagtagatgcttttcaaagaagactcactatctcctttttaaaagagaagagcctttttgtttttgtaaaatcaacacatttaaagtttaaaattcaaatgatgcagaaaaatataatgaagatagtttaaaaacacgtgaaattctacaacccagaaaaaatcacattaccatttttgccaaaacacatttctataaacactctatagatttatacatatatgtggaccatactcttttgtaaattgctttttatttcactcaagaatgtgcaatatccatctcctcatatatgttactttaatattgataaacattttattgtatagatgcctcatcatttacttagctagtgttctaatgatggacagttaggatcctcctaatatatttctgcaattgcaaatgatattgctatgaagaaccttagagctaacttcgcacatgtctttatatacttccatgtaatactttccagaagtaaaattaatggcaggtaagaattctaccactgaaccacccatgctagaaagtaaaatgaatggatttagaacatttgtactttttaaagtactttagaaaggtattgaattgtaatttcacagcaaattatgagactgctatttccccatacggtagcagatatgaaataatacaattgatattgatttttgccagtttgatagatgaaatagcactaatttttgtttgtatttttaaatagcaaagtttgactctttttcttttctttctttcttttctttttttttttttttttgagacagagtcttgctctgtcgccaggctggagtgcaatggtgcgatcttggctcactgcaacctccgcctcccccgttcaagcaattcccctgcctcagcctcccgagtagctgggactacaggcatgcgccaccacacccagctaatttttttgtattttagtagagacttggtttcaccatgttgaccaggatggtctcgatctcctgacctcatgatctgccctccttggcctcccaaagtgctgggattacaggtgtgagccaccgcgcccagccaactctttttcatatacttaatggccagtttatattctttgctcattaaaaaatgggatattagaatatttattaaaaataaccatttgtctgtcttatacatgttacatacattttcccagttaattttcaaattttgttttaaattaaatttaaacaatcatatttttgcatttccctttaaaaagtgaaaaaaatatttttaaaggggaaatgatacatgtatcatgatgctgcagagagctttgactgaaggaaacttggaggtaggtggcaaagtgggacagatggcatccttggttgagatgcagaggatccacttgggagttactcagccagaggctttatttaaagatattctaatagtttttgcttgtgtgttttcaaaaagtaagagaaagaaaaaagccaaatggaaatatctaagtgtaacacacacttgtttttccattgcttttccccaagttttgtgaattgctcaggctactaaagactggagttgttttcagggagagtttggatggttatagcacgatggctgctaaaacaaaaacataatgggacaggtcttccttgactgtaatttgctttcttccactctttcctcaaaggcttcatatctaaaatcggcttgaagattaaatatgtggtcctttgcataagagattaatgtcaatttagctttacttggcaattagagggtaaaggcaagaaaccaaaccagaaagaaaacaaccctaaaaaacactatttcaggttttgatgtgcttgcattgtagcacttaaaaaatgattctacttgaataggaaatctttattcatttgggcttcaaatggctttcaaaattataggggagatatgttgcttactcagaagaatgctctacttccaagaattttggcaattttatgttgtagaggtggattaatattctataaatttgaagacatttactatgggtcagacactgttcttggtgcttttaaacataaatataaatagatacacacacacacacacacacacacacacacagatctgtatgtatatcttgcttaatttgcttgatgtgatcttgccttcccccaagccttgaaggagcaaactgaggaagctttagggtggtcctggagttctatgtcgttgaagacatggccctttgcataaatacttcaacctcttcttagagggttggaatgaaccaggtgtataaggcctgagtcatcctaagtatatgaggagtcaatgatagggacttatccttcagtcaatatcaaaccaggattgtacttttcattcttaatgttatacggttaaggaaaaacctaggtttttaaaaagttattacttttttaaaataaataattgatccacgtgggagaaaatttacaatgtaccaaatggcatacactgaaagatgtctccttccctttcccataccaaccagttcccctcctcagaggcaagtattattgtcatgtatatccatctagaaatattctgtgttcatataattatgcatgtgttcatgcacacacacacacacacacacacacacactcactctgctccaccttttcatggaaatagaaacataccataacactgtcttgcttttttcacttaatacagtatcttggagatgcattattgtattctactgtgttgatgtgtcaaatttattaaccagttgaaaatagtattttgctattaccaaccaaaatggcaatgaatattcttaaacatacaacattttgcgtgaatgtgggtgtatttgttggacaaacgatcaagaagtagaactgatgcatcacagggctcatgcatttttaatcttgaaagataatcaggctctgtgattctgcagaacaagttagtagccctttttagtaagatctccctgttagataaattagcagggtccaggtcagaagtgacttcaaagttcctttcttgaaatgtctcagctaggtgcaaactatgactctctggaacatgtgaaaaagatatccaacttgtagatgtggtactcacctgttaaaaccaatgtcaaggtagaccttagaaccctgcagatcctgaagggcaatagtaagagacctcagagtcattggagtatgacccactggggccaccaaagttatacactgtatttgatgctacctgctattaattaggctgaataatatgaaattattacaggcagtggctcatgcctgtaatcccaacactttgggaggcagaggtggatggatcacttgaggtcaggagtttgagaccagactgaccaacatggtgaaaccctgtctctaccaaaaatacgaaaattagccgggcaggatggtaggcacctgtaatcccagctacttgggaggctgaggcaggagaatcgcttgaacctgggaggcggaggttgcagtgagccgagattgtgccactgcactccagcctgggcaacagagcaagactccatctcaaaagaaaaataatgaaattgtagacattagactagtttttacctacaaaaatggcaatttttcatttcatttgataagtagttcaactaatattaagtttattttttggtgtcttagggagaattccttagggaactgggaaagatttcacacagaaggtaggttttcaagcctgggaagcagagagataggaaggaaggttgggaacgtagacaagaacattgcaagttgtgagtatagaagacctctgggaatgagcctgcatggaaggtaaaagtgtgaatcaaaggagtgatgttctgtttctacaacttttcatgaactgaagtggatctcccagctccttgtgtgaagcagaaaactgtagttcatcaaaaataattgggtcagagaagtggtggttcacattcccaaatatgtacatctggattagggttttaacctcagaacagaaggtgatgggcattgaaattttggtatatccggggttttggtactgaaaacttcagttgaatattggggtcaaaatccaccctgttcgtatagacttagaagtggccctgaagttcattgtcttaaatggttgctaaggggatgattatagggattttcccacacttggagaagagtcatcctggagcactgggataaatatagagtgagggaaagtgtgtttccttttaaaattagaaatacaatataacaacattggagggagtttagaaatagaggggtatcttcacctataatcaccaccctaacaaaacagccctgaatgtttatgtaatccttcgacttcttggcaatttgctttcatatttttactccactgtaactacaagcttttcttattttacatttcagttttgctaattattattttaaatggctgcatattagtcccttgagtggtggcattataatttgcccacttattttcccattctcagacatttcaggttacttccaatttcttactattagagaaaaaagtatttttaatctctaggctgataaaaggcttcagtccacactttagttttttctttcttctttctttcctttctttctttctttctttctttctttctttctttctttctttctttcctttctttctttctttgacaaggtctgcctctattgcttaggcttgactgcagtggtgtgatctcagctcattgcaacctctgcgtccccggctcaagccttcctgccacctcaacctcccaagtagctgggactacaggtgtgcaccaccatgcctggctaattttctgtattttttgtgaagatgaggtttcatcatgttgcccaggctggtctcgaactcatgagctcaagcaatccttctgcctcagccttccaaagtgctgggattacaggtgtgagccactgcactcagcctagttttttcttattaaagtaaattactctgtcacatggcttccctctgtcagcagagaaacctatttctctattttactagcactaaaggcaatagtatttattgcaaagtgtgtgggatagtgtgtgacaaataatgagggctatgtcaatgtaagttattattataactaggattcctggtcaccaataccagaaaaagacctgtagataaagaacctattgagaagatactggatcacccacagagaattagtatcaacgaatatggagcagccaagcggggctggcagcagaactgtagcctaaatcgtgccataggacttgtctggtttctggacacctctgctgaaactgctaccaccaatgtccctggactggattgacagtactccatccccaccaggaagaattctaccccttgtgttttttcattatctacttaagattcaagatagctgaatctaagttatgttcctaattcttatgcatctatagtgggagatagggctctgcgtcccaccaggactctgacagtggggagaacaccctcaaaggggaaggttgttcaagttccggggggtcaagtggtaaatatcttcacttgctcagactgcctctcacctacaatatagctcagtcaataaaggagatttctactctactgattgcctgaaggtaaaagagcttttgggataagcagcaggttgaatctttgttatcgaagggctctttttgagggggaaaaatggcaacagaagggagttccctgcaccagcaaaaatgcccatgagaagccttctgttgccatttttccccttcaaaaagagtccttggataacaaaggttcaacttgaactatgacttatatcaatgatggggttactttgtttcctggggtattagatcccggtacaattagttaaatgtctcctcccctccccacctctaaaataagaactgaaagcagagacgaagtcagagtagaaaataaatgacatgtttcttatgaaagcttactaacaattaggaaaaaatttttttcttttttttgagacggagtctcgctgtcacccaagctggagtgcagtggcaccatctcggctcacttcaacctccgcctcccaggttcaagcgattctcctgcctcagcctcccgagcagctgggactacaggcatacaccaccacacccagctaattttgtatttttagtagagaaggcgtttcaccatatgagctatgctggtctcgaactcctgaccttgtgatccgcctgcctcggcctcccaaagtgctgggattacaggcatgagccaccacgcccagccaacaattaggaaatttgacccactcccgaacttgaacagtactgtactgactcagagctctagcaaatatacaaattaagaggaatagactgcaacacagttacataatttacttaaaactctctcagtggcttctcgttagtttagaacaaaatcccatatcgttcttcctgacctatcagaccctacatgttctagccctggcctttctatccagatcctgtttaataccctctaaccccagttcttggctttctttctgattcctccttccttaggtccttgtcatgttgttccttctgcctggaagggtcccctccgtgtccaggcagccctaggccccatctaacactaacttctgatctcagagaaatcatctgctgctttagggaagccttccctgatcccaggtttggtaccctggtatatactcccatagcaacctgtctgttgtatcactcattatacctgttatttctgttaggctgtaagttccatgagtgtgggcacctcagtcatgttcaacatggtctcctctgtgcctagaactgttcctggcagagcatgggcactcaataaatgtatatagaacaaactgaattaaagaatgaatgaatgttagctttgcttgtccttatattaaatgtgcccataatcatgtagattattttaaaagaatgttttaagaaataattttaagttgcaaagatagtagagggttcttgtaaagccttcttccagtttcctctgttaacatctgacataaccataatacgtttatcaaaactgagaaattaacattgacacattactagtaagtaaactacagactttgttcagatttcaccagttttgccattaatgtcttattttctgtacagtgtccaatccagagtactatgttgtgtttaattattctgtcttcttagtctctttctatttataatttttcccctttttctctttctttgtcttccatgaccttgacacttttgagaactagtggtcagatattttgtagaatgtccctcaatttgggtttatctgcattttctcatgatttctggagttacagatttggggcaagaatgtcacagaaatgatatgttcctctcatctcatcacattataaaatacataatgttggtgcatcttattacagcaatgttaaccttgggcacttggttaaagtgtctaccagattttgctgtgtaaagtgtcaattcttccttttccatagcctatttggtagaatcaagtcactaggttaagctcacactcaagggtaggggagtttaagttccatctcctggagaaaggaaaatcaaatgatttgtagatacatgttagaatcaccacagctatttactttgagggaattaacctcaaggctatgcaactgtcctgcctctcctgaaagttttacccacttgttttagcattcatcgtggatcttgcttgccctacatttattatcacagtgtccatggattctttttttgtacaaagaatgaaaattcttgttcataaactgctttgaaatttgaagtttagttcttgtttcctttttctttctttagagagaggctcttgctctgtcacccaggctggagtgcagtggggcaatcgtagctcactgcagcctcgacctcctgagctcaagcaatccttccactttagcctcctgagtagctgggactacaagtgcacaccaccacacctggctaaaagtttttattttttgtagagatgaggtcttgctatgttgcccaggctggtctcaaagtcctgagctcaagtgatcctcttgcgtcagcctcccaaagtagtgggattacaggcatgagccactgtgctgggcccacgtttgtttttcttagtaactgaaacattattcgtatgtcaaagactattcatcctagaggaatgaaaatgaggtattgccctcccgctgacctttttctagccctaactttaaggtcaaaccacagctcttaatttataaggacactgtaaagttttcagctcggatatttcttatgaaaattaagatgggagagttaaaaataacagaagaagtaccgtcaacaaagtgggataattaaatacttaggcagaaattaataagacccagagaagcttgttgtgttttcagtttcattagcaaatctcattacttctggagtcttaaatgttgcttaaaacacaaagttattatccctctcctatgctctttctggcatctagaagcacattttatagtcaattctcttaggagagatcagggtggtggcgaatggagggacaagagctttataaattgtaaaagtcctacaaaggggagagattggtattaccatttttctaattgctcaatttttaaaaaaaagcaaaaacttggcaacccaacattgccttgtttcttggagcaaaagtgggaaataactttgtctccatctgctagggacaccaaaaacaggccgactctttactgagtgtgtaatctccataggaagtgggatagaataaaatggaagccacaccagaaagaatcctgagttctacattttaacaaatggcaggggctctggaagagcttcaaaataaagagaaaaaaacagtggtatctgacaatggtatcagaacactgatgtgggatgattaaatattcagaggataaaaaacatgcacatagaaagccattcaaaggattaagagaaaggttattttgtgactaaaaagagaaaaaaattaaaatacccacccccataatgaatacttcctaacagtaccatggaaccttgactcttgactctgtgctgtaccttgcattccagatgacttgtaaagcaatgatttattggtcccagagccagtgagcttgggagcagttcaataagacagtgtggtctgtgggtcctgaatcattattctacctggcaaccttatgacacctgctgaatcttggagggggccaggaggaaatgatgttgatttatagagggagtgaaattgtttgtcaatgaaggtataaccgtgcttcttccaggctcaggcaactataggaaaccagattggcctttactgacaaattaacataggccaaaatttggaaaagagagcattgccttgcatttttattaaaaccttgtacttttgttaaagatttcactatagctctattaatatactttctataatattggtcaaagaatacaaaatgtcatttatataggagaaataagttcaagagatcgattgtaccatatggtgactatagttaacaatatactgtattcttgaaaattgctaagaaagaggatataaagtgttcctaccacaaaaatgataactatgtgaggtaatgcacatgttaattatctagatgtagccatttcacaatgtatgcatacttgaaaacatcatgttatacatgatatattcaattttatctgacaatttaaaaattaaaaaaaaaactttctttgagatagttggtacaaacttctttataacattccccataatgtttgtaaagtggtgctctgggccaggcctggtggctcaggcctataatccgaacactttgggaggcagaggtaggtggatcacttgaggtcaggagttcaagaccagcctggccaacacggtgaaaccctgtctctactaaaaatacaaaaattagctgggcatggtactgcacacctgtagtcccagctactcaggaggctgaggtgggaggatcgcttgagatggaggttgcagtgggccaagattgcaccactgcactccagcctgggtaacagagccagattctgtctcaaaaataaataaataagtaaataaataaagtaatgctctgatgggtgagcgtgatgcacagtgtatgtatatctttcaagaactagctttgtgttttctaaatgatcataataccctacattcatatgtgtatgtgtacgatattacacccttagtttcattttctttttataaaaatcatgtgttaaacccattttgaaagatgaggaaactgatactcagagaccttaaataacttgggtaaggttaaccagatagtcacagagctagtagccatagaatggaatgtggcccttcacccagtttttccactgcactggttcctggatagagagttttgtgctgctaacctcctaatacccattggaaaataagacaggtacatgcgttgtggagtttggcagaatcaaccaaaagcaattctattttctttacattaagcaccaaaaaattaaaagctatccaggcttgaattttagatagacaggtaataagctgtgattgctcttagatagggccccccaggaagaagctctcagctctggatggcagacacatgaataaatagtcaaacccatcataagaataattctgcctgggatttgggaaggagctgctcagaaaaagtggggacgattctttaatggactccagagtctagagcttcaaagccgaatctgggagagccttgcgtatggcacagaagcttggaaggaaattaaaaccagcagagaatgtaattacctgagtaggaaatgggctgcaatttaccttccccaagggtgtgcattctttggttactaaaaaggtacttgctttcaatgagtttagtacaataaatggattttctcatccttgtagtggattttaaaatccaaatgttgtgacttgggctgcaatttaaaaaaattctgctattaggggctgggtgcagtggctcacgcctgtaatcccagcactttgggaggccaaggcaggcagatcacctgaggtcaggagtttgagaccagcctgatcaacatggagaaatcctgtctctactaaaaatacaaaattaaccaggcatggtggtgcatgtctgtaatcccagctactccggaggctgaggcaggagaatagcttgaacctgggaggcggaggttgcagtgagccaagatcatgccattgcactccaacttaggcaataagagtgaaactccatctcaaaaaaaaaaaattatgctattagggacacacatatatgtattatggattatatattaatggcctcttagtcagtaaattaacattgaatagaatttgttcaaggtaccgatttcattctaattaagcctgaagtctatgttgctcttgaggagaaataatgaaaatattttaacaattccaatcagataccattcttttaagaataggagttggtggaaagagtgagtgatgtaatcaaattccagtaattatttatatccacacattcattcttgtaatgctggccttccaagtatttcccagtgtagaaactaacttttatatattgaaggccttaactgaagatgaatccaagatcctgataagacacatgacgttttaaaaatgtgaacatttaaccttccacattcataaataaattcatcagggtgaagcaatttccaggggcatgggcaataatgttggggcctaaacgtcagtatctcattttaagttctgtgtcttggtaggatttgtccactgcactggatttagattcctcccattagggagctgccattccccaggatattgccaggaaatcccctaagtgtcagtctcaggccaggtgactctctgactaggcttccttgggaagcagaagagccaaggtgggcttcatggggtgctcagattcccccacccccaacattgggagagctcggaagcaatcacatcatttctgggtccttgctttctccttttgcacaaagtggacatccaagtattaatatttaagtatagaagaaattactgaggaaaaatataacattgaatattgctgagaaatgagggtagttctaaaataagtcagttgatgagaagacaataatttcagtgtaaatggaaaatgaaatctttagtattcatgttatcttctctctgagcctttctttgagtctctatcaccaggattttaagagttcatggtaagctttaagtgaaagcaggagggacctcagctcctctacttaaaatcaaggtccgtgaagcacttgctgactggcagtcctggggacattctgtgcagaattgcagtgccctatagtgtgagaccactcacattcccagcttgttctaaaatgccattcagagcaaccacaactccagacggctggtctttgtgcatttggaagaaggagaagtggggctcaaatttaaagctttccattattatagagacaatagccaagaaaagttcattctgaacaaagttttatgttaaaatatattttttttctgcttcctgagacttgcccaaatagtttcagaaaacttggagagatttttgcctatggccctattatagtggaacatcatgtttcttcttgtcctttgcatataatgacaaaggagctagctgtgcttctagtcggctctgattctgcattttcagcagcataaagaaaaacatctcattccttttatagaaatgcaatcccctgaggttgtcccttaaaagctgttttgattcatggatgttgtggctgccaaattctccaactcccaaactaccactatgcattttctcttggacagggaattttaggatcatccctcctgaccccataataaagccatttatttctccctgagatggaagattcattaattttttttcttgtttctcctttgcaattatctctattactacccataatcttcccaatctttttcaataacatcctgtgattaaagccaattggctcatgttgaaagctagaggaaagttaaccaggcacagaaatatcacccttggattaaagaaaaccaactttcactagggtggtgcttgagagatttttgataaggaagggtggatattgagctgacactaacgttaaatattgttgtaaaaaaagaaaaaaagctgatgctcaaaatagggctgagtaacatacggtagttccttacggcaggccaaaggacagttttgcctgcaaatgaggtcaaaggatgtcttgttgattttcaaatatcatcctaattattatactgggcagcatttcagaagaagaactagggaatcttaataatgataatagtagtagcagtagtagccaccacttatttagctgagtcatttgcatttattatctcactttattctttctataaccctttaatataggcattattatccttgttttatagagaggctaagtgatttgctcaaggtcacccagctggtaagtagcaaagtgaggatttgaacttgggtgtgaacgcccgagttattttatgcccaggattgtgcttggcatcgtaggggaatataacagaagcacaaacacttttcttgccttgagttaacagtttgacttgggacactaggaatccttaaagaacactgaacaatcgtatacaactaaatcccctcagtacttaatcccctgttactagttaatacctttttaatattagatagtccttgttcatgttactcgtgtagcttctgtctcctgattagatccatgccatggaggccacacactgataggagctgagaagaggcaaggaatgtggagggcagtgtttgaaacctggagacactgtttattggcggtaaaaccttgggcacatacctgccctttcagtcagcttcctcatctaaattgaccccaaaggagtgttggagagaaaaattaaaaagtgtgaggaagtgagtttgtacacagtaagtcttcctttaacaaaaatgacaacatcaatgctaatataatagctcagaaacagtgctattaaaattcagatgtaggctgggctcagtggcacatgcacccgaggtcctgcctactcagggaagccgaggttggtggatcgcttgagcctaggagttcaaggctgcagcgagctgtgattgcatcactgcactccattctgggctacagagtgagacctgtcactaaaattaaaaaaaaaaagaaaaaaagtgaactctattacaaataaaaggcataccaccaccacacttgtttttagtaggaacattttaaatcaggcttgtgtttgggcctgtgaacctggtccatcatttcaactcttctaaggttcctttgaaaatgctgagtaccgcattatgggtgctttgttatatgattttgtggatgctttggtatttctttttgttgttgttgttatgacagtctctctctgttgcccaggctggagtgcagtggcacgatctcagttcactgcagcctctgcctaccgggttcaagcgaggttctcctgcctcagccttctgagtagctgggattacaggtgcccaccaccatgccgagctaatttttgcatttttatagagacggagttttgccacgttggccagggttgtctcaaactcctgacctcaagtgatccacacgccttggcctcccaaagtgctgggattacaggcgtgagccactacgccctgcctggatgcttcagtatttctgaccagatgataagcctctgaagagaggggatgacaaatcttatttcttgggtctcagctctccttcatgtcaattttagtgccctgtacacattaatttacatgcagtaggtgatttttattcagtatgcttttttgtttaaggtcctctttctcaaatatctcccctgttaaggtgccacagtgggtaaatgttaccatttttctgatttttggataaagactactgtctgtagatattctttttaaattgatttactcctggaaggattaacatatggaactgctagtaatctttcataacttaatgtgaattaacctatcaggtaatttccaaataggaaatgaccagacaacatggaacacttgggagaaagaaaatgcattgaaagttaggggaggagagtgagggaaaggagtaggcacagactactaattctactaattctgatgagagctacacctacacactggatatgtacaatagatattctcttatctcacagatgcagattctcttatctcagatataggaattatagcagaactttacctgctatcagtagatttgggtgataacataatacagagcttaaatgtgtaggctctgtaattagctagatctaggtttgagtttcagctcagacatcatctagctgtgtaatattaggcaagtcattttacctctcggattcactgtttcctcatctgtcaaatggggataataatggtagctacacagaaaatctcactgaggatttagagaaataatgcatgtaaatgattagcacagaatttagcatgcagttagtagcattaactattattattatggttactaaatattacccagagttaggccatggaaaaatagtctcattgtggtattatgaatcctgtgacaatcacaggatacaaactactgtggtcagcctgataatgacagtattagatgttgatattttcctagaaatcataattaagtcctaaatttttttttaaattttttatttggaataattttaaatctgtagaaaagttgcaaagatagtatagttcccaggtacctttcaccagcctcccctaattttaacacactgaaaatatctttgtaatgtgtttagatatattaataataacattctcaccattctactagttctagttcttgtcttttttctggttcctgtttactgatatctagcatggtagacagaatttttgccttcatttcttcattaccaatggtaattttaatatccgcatccttgccatagtctcacagtgggcagagtctcacagtgggcagagtatatgcctctattccttgtcttaaggtttggccatgtgattccttttggccagacaaaacacaagcagaaacttaaagtgaacttatgcagttggagcatttggggagagaggaaaaataaacagaggtgcagtcagtcatcttgaacttgaacttgaattccccaatcttctgtaacaataatagaagtgctaagacctcagaataatttattgagaaatactgagctcatatttatagtgggatctgtttacaatcttatgctatattttaatgtaaatatgaatatatacacatgtattttattgtatgcattctttatgtcctctataaaggatatgcagtgaagttctggtattattttcttttcattgagtcctttatttaaagcactggttctcaaccttggttacacatagatatctgatgccaatgtctcgcctatagaaactacgattcaattatctgttttgggacccactcgccagttgttttttgtctctgtttttgttttgctttgctttctaagcccctgaggtaattgtgatatgcagccatgtttgagaaccactgctttagagtatattttgagatcctaaatgtatagtttcacacctgatttctctttctgcattagattgtttcaatgagtccattcattccttcatgcaatgctgatggccctgtcattacaaagactggtaactgtaatatcacctgccctatagcttgtgcttcaagcaatgctgcaaaagttgaaaaacaggaaatgcagttgatttggaaaatgacaccctcctggaaggaggagggaattatagcatgaaaaaggagctgagtaacacacatatatgggtacacttattctataactgccacttatataattataaatatttaaaatcagtgtggccagcattgtcttcaactcctgattcacctgtatgtgctctggctttcaatttcttgaagaaatgtttctgggagaaaacaagggcagtcaattatccatgtcatgagaaaaatctctcacctgctcagatacctgcccaggtgagaggatgtggttaagaaaaagagctagcaaataagatcatgcactccctttcctgtattgtgtgaaggcagtttcattgggctcaatgaaggaatcaaagggaacgtggtcaaatgcatcacatcactggctcattggcatctagtcttcccatttttaaaccagaagccaacaggaggttgacttggaattttgacttccttcattttacatctttgcctttcttctttcagacttttccaggcttgaatttccagtcaaccctttgtcttcactcaaggttacgttattccaacctcttttcctctcattcgtcaatggtgtcattagaagtcaggatcctcaagttccaatccagctctgcctttcattcagttgtttcactctctgagccttaagttttttacttcattttctagatcaaaaaaaaaaaaaagagagagagagagactcatgatacttgtccatctctaggattatttgtaggtttaaatgaaataatgtctcagaaagggctttgtaattgtcaatttattctcagtgttgactgcttacctgccattgctatgggaaaatgggaagctattaaaatattcaatcttgatctttattcttccctttgaaaccaacagggattttgggtgacagaacaaagaacaattttaagtgaatattgagtagacaaatatgcccagattgtttcaaatattacagaagaaattagaaaccaaaatgaaaaattaaaaaaattccagaacaaggaggttttctttatcagaatttgttgattattcattttggaatttgagtagaaataaaattcctatgaatacattattttcaaatatggattaataagaacaggagaataaagtctttggcatcaatttctggattccttacaatatccccccaacttatcaatcacacaaggagttatgccctacagaggtgtttgtgaaagtcacaggcaatgagtaccaacataaaacatttggattctcatgtgcaattgacgaaggtcagctaccaccaaccagttcccttcctgtcttcctctgtccctctttgggctaaattccttcaagatcaccttgcagtcagcaacatcttcctggtaatagcagataattcttactaaacactcccaatgttgccactgttggtatattggtatattgttgctttattggtatatttcatttgactctcacaataagactacaaggtggatgtagtagcctataaatagccccccaaaagatatccatgtcagaatccctggaacctgtagatgttcccttataggcaaagaaaagggtctttgcagatggggatattattctagattatcagggtggacttgaatgcaatcacatacatccttataggagggaggtaaggctgggtgcggtggctcacacctgtaaactcagcactttgggaggctgaggcgggcaaatcacctgaggtcaggagttcaagactggcctgaccaacatggagaaatcccatctctactacaaatacaaaattagccaggcatggtggtgaatgcctgtaatcccagctactcaggagactgaggcaggagaatcgcttgaatccaggaggcagaggttgcagtgagctgagatcgcaccattgcactccagcctaggcaacaagagtgaaaatctttgtcaaaaaaaaaaaaaaaaagagggatgtagaggaatatttgacatacggaagaggagaaggtaatgtgaccatggaggaggcagaaattggaataatgaggccacaagccaaggaattcgggaagccaccaggaactggaagaggcaagaagtggattctgccctaaggcctctggagggattgtggccttactgacaccttgatttcagctgataaaattgactttggacttctggcctccagaattgggagagaataaatttctgttgttttaagccaccaagtttctaatatattttacagcagtcacaggaaactagtacagcacacattaatatcatcatggccatttatataaggggagagccacatttgagggaagctgagaaactagaccaaagtcaagtggcatagtcaaaatttgaattctgaaagtcaaacttcagagtcagcacttttaactggtgacccttaacagtccataatagtactgttgaatgctggcccagtgtgcggcacctgtggtgatcacacatggtatcattactggtttcccaaatagtcattttccaagaccttgggggtaaagaagagttctacactccttccctgatatcactcagcctttgggtagtagagaaatggaatcaccatcctatttccctccctacctgctatggtctgaatgtttgcgtcctcctcaaattcatatattgaaacctaatcatcaatgtgatgatattaggaggtaaggcctttgggaggcaactagatcatgaaggtgccgtcttcatgtatggaattagtgcccttataaaagaggctccagagagctgccttgcctcctttcatcgtgcaagaatacactaaagaagcgtcatctatgaaccaggaaatgaatccttaccagacacagaatctactagcaccttgatcttggtcttcccaggctccagaaccataaggataaatttctgttgtttataagccacctgatctatggtattttgttatagaagaccttgtgaactaaggctctaccctttcagtttccagcaaagcatttagagcttctagatacattcagaataaggggagtttgttgaaggtgacactagatcctgagttagcagaaactcatacctctagctataccaatggatattattacaatttcttgttaagtactgtaattagtcatacacatgggtctgaatcatctcttggcctaaactatcatttcagtttctccttaggcaagggaaatagtgcaactgctatacacaggtggatacctgtgcatcatgcatacatacctatatttatttacatatccattgcagctcacaaataaagatcccaatgataaataatgactacctatttagtgatgaccatttatgggctagggtctttatacacatccttacttacttgaattttcacaatagtcttgtgaaatattgtaatactgtctcttttttttttatagatttgaaactccccaagatcactaggggaaggggtatttaaactcagatttgtcttgcaaaccacatgtttctaatcactcaacttttctgtttttctattttgcttccttacacaagagtctattagaggcgtgctctctctctctctctgtagaagtgttattgtgtgattaataaaagacagagattttggtttatcttcaccagtggaaggctttgatacattactcaatgttctctgtggtatcctatattggataacagtctcaagctcaaaattaaagatttctttagatcaaatttgattgcaatcaacaaaaatttacctaattaaaactttggagagatttctcaggttcttcaccatgggaaaagggctttgaaagcctaaagaatgaaaataaggcatttcccatcatgaataatgatgtgaaattgtcttagaaaggattttttttgttgttattgcaaaggatagacacctactaagtcagcgaaacaaagagagggaatgcataaagaagcacagttgtctaactgaacccagaataatgcaatggggtctcaggagaaaaggtatccactacagacccagctcctagaacaatgcctaatttaaagtcagggttcaataaatacttgttgaatggaagaatgaatgatttctaaatttctaggaaatagaatccactttgctcagcttgggtcaagtgttcataacccagttcaatcagttttggccagaggcagaattatatagggccctggtgggaggagagggtgtgtttctcagagaaggaaggaacactgtgactgagaagacacctcaaaaggtgacaaagaagcaatacctaccttgcctcaatggagggctgagtcccctttcgagtgtaacaacatggccctgttagggaaagtgtcgtaaaattgggacaaggtagaggtagttgaacagaaaagtcatcttgatcatattttgcctttatacttttgaatattggaacaaatgaaatattctgaaaagatgaagagaacacttctttgtttatggaactaaccaactctgttgaaagtgtcatggatgtgtgtgtgtttgttttgcccagtagggacaatgttgttaagggatgccatggtgtgaatacctgtgtcccccccaaattcatatgctgaaatcttgctccctcaaggtgacagtatttgggaggtgattaggtcatgacagtagggccccgtgaatgggattattgcccttataaaagagaagccccagagagctgccatgcctcttctaccatgtgaggacagaacaagaagttgccatctatctgaaaacaggccttcaccagataccgaatctactggtgccttgatcttggacttcccaaccttcagaactgtgagaaataaatttctgtttttcagaagccacccagtttccggtactatttttttttaatagcaccctgaatggacttatatatggtgctactgtacaaggcaaagattaaagtcagggtctatgtttggggcagaaacacctaattgacagtttgcaggctttgattagctctagagaaaccacccgaatctgagcttggtcagggagaagccatgcttctaaggacaaacaggacctctctcagtttggtcattgcctactttcttggctcctctgtctttgtttatctcccccgactccatcctcagcacattcacaaatgcttcagccatactaaatgtctcatctttccccaaacctctctattcttccaggcatccatgtcttaactcaagcttttctctctgcctggattttcttatcctttgggtgaacaactacttacctttcaaggtttcacatttagtcacccatgaaatctcctctgaccttctctctacatccacaaactcccccttttatactcttcgttactatagaggataggaagacaaaaccatattctgagaaattcttgcagtaagctgatgtgaccaaggtttgaggaaatggctttgtttacctgacacgtggaggtagaagtgagaaacaaagatggaggccacatacagggaggctgtcctggcaagcatgatggtagaggcatttgattcttctgaaaccaggtggcagctttgccagtgttcagtctctggtattatagcctctagcaacagagagtgtagaaatagggatactgctaggatagtcccgaggtgttgatgacaaggctttttgtttttttctggatgtgtaacatccaagcctgactctcttggaaattctgcaagctgtagtaaattagtaaattcctttgtacttacactacagaggattctgtagtcttcaactaaaaactcttattgacactgcaccccagttcaggttttatatatttatatatacatatatatatatttatatatacatatatatatatatatatatatatatatatatatatatatatatatttttttttttttttttttttaagattgagtctcactctatcacccaagctggagtgaagtggtatgatcttggctcactgcaacctctgcctcccgggttcaaatgattctcctgccttagccacctgagtagctgggattacaggtgcctgccaccacgctcagctaatttttgtatgtttagtagagagagggtttcaccatgttggccaggctgatctcgaactcctgacctcagatgatccacctgcctcggcctcccaaagtgctgggattacaggcgtgagccactacatctaggttctagatctgaataagtgctgtgtttcaaatatcttggatttggtaagtgctgaataatggatgcatgaatgagtgggtagatgtgtctcaaagggcaatctctaattctctaggttccaagatagaaatgggaaaactcttggtgacagtaacatgaattgagtttgaagagccaggggctgagtgtgaagagcacagggcaactagaaggaagttgaggaaaagtagccttcactcctgccaaacagagcacaggggcagctttcattataatgtaaggtcatgctgtgtctacatataccatgttgattcactatctccagcagaaaaatgcctggttaatttcaatgaaaacaggtaaacttgatgcttggtgttgtgctgactaaacacgcagtgaactgacagaatcatattgaatgactggcttggtggcacatcaatatacagtcccagagacccagccaagtagaagggtgagaattggagatgagattgggtctgaggagtgcaccgcagggctagggatgctgagcaaggcttgaggtgatgggaggaaataaaaggaaatgtggctttcctattgtgttttctcttttcattttctatggcaaggagattgatagtcaatatgattgtatgttgtagctaatatatgcatagatgtagctatatggatgtaatcaccatattctatgacagtagttatctaattctctgtcccacctagcctcaattttcagaggggctcaggacaggcaggacaaatggaggatagtaaggagtccctgagccctaatggtcagtaggacggctcagatcacttgcagtcactgccaacaattctatctatagtccttaacttgggactttaattcattaggtatatttttgagaataaattactctcaccatgggaagtttttatctggtcttaacaaagagctaacttacacctaacatgctggacaagtgtaaatttaatttaaatttgcacacctcccttcccccacttactatccccagggagctgtgtgtcataactcaggggcaaggcatgtttgcattctggcatcacagtggcagaggggaaggagagagggctggttgggagttagcctgctgtagcctgctgtagcctgctacagaagcttccctagttctaggcagtgtcttgagcagggattcttcactgagggagcacatcagaatcatctatagaactttcaaaaactacacatactcatggacctttccccaatccagtaggtttagggtgtggcctagtcatttggattttgaaaaagccccatgagcagttctgatgtgcccctgttgacggagaaccactgataggcgcagcaatctcaggcctagttctgatgactatccctgtggatagggacagcatcatagagcaagatgtgaagaggagtccagttcagagggagcaggtgtactatgagctcagtctgcaggtggcaggaccccagaagcaggtaggggatcttagagaacagagcctagccttacaggagggaactgagccctagtccctgctggtattcaggttgaggctctcggtttccagcagaaatctaaactattggtaggaaccctgggactcaagtcccctggcgtgttcctcaaacacaggatctgctcaattgcacaggagactaaccatgatggccactgtagctgggaccctgcagcaagatctggggcgtggtcaagagtttcagagtgaggcctagggagaaggccatccatatccactccaaccttgtcagaaatggggctggtgaactcaggagggcttgttgtcagtcccacctggggaagatgaaggtggaggaaataaggcaagggttggcagtggttgtaaacagctggcccaggatggcttggttactgtcccagccagcaagtgcctccacagtggtgccctacagacacactctacaacttgggggtttgatctagatggttcgtttaagctcagtgtgttttttggggtttgtaaactacttaaattgtgacaaaattttgttcaccaggggttcttccctagaaagctgcagtctggttattctgttttgaggtctctgttgcctctgctgcaaaatcttatggcttgctctgtcttttgcctgtgctcatgcatttccggaatcggtctgttttccctggaaattatgcctgctctacaaaatgtgctgatttctctgatttgggtcatcttctctaggtcacaggtgctctcattgtctactactgctgatttgccctgtgcccatcctggctctcattgacagcttccacctgtttgcacactgtctacacttccgctgcctcatggttcattcccaactcttgactctgttctccatgggagggactatttcactgcagaaacccaattatttaggagggaatgaacaggcttcttggcatagaactgctaaaaagacccacttcccgctctttgagatgaaaaacacatgtttatttcctggtatctcaatttctggtccctgattacataaagttgtcagatttagctaataaaaatacagaataatcagttaaatctgaacattcgagacactgttacattaaaagttatttgtggtttacctaaaattaaaatgtaaccgtgtgtcttctattttatctggcaaccctatgactgaaagaaagtagctgaatttgaaagtagtcagaagggtactggaatactgagttacagacacacacacaaacatccctgatgagtcagattactttatggaaggtacttgggcaaatgactgctagttgttatccaacatgtattttcttcttttagtagaacttccaaacttattctgagcacaggaaaagagaagggtgtatattgctcaatatctcttgcagctagaagttgccagaagagtatgagaagaagtgatgtgtacaacttcaggattatgcccttagagggaagggccatactctccactcccctttctcactgattggaatatagacagggtggttggatctgggacaggtatcttaggataagagacagaggttgtgtgttgagtataggagctcaacaagatagaagagtcttcaacatcacatcagccctgcctgcttgcactgatggtttggcttggtgtccccacccaaatctcatctcaaattgtaatccccatacgtacagggaggaaattggtgggaggtgatagggtcatgaacaacatcggttcccccatgctgttctcatgctagtgagagagttctcatgagatctgattgtttataagcagcagtttctgctgtgtgctctttatctcctgccgccatgtagaacatgccttgcttccccttctccttccactatgattgtaagtttcctgaggcctccccagccatgcagaactgtgagtcaattaaacctctttccttcataaattacccagtcacaagtagttctttatagcagtgtgaaaatggactaatacatgcacataaactgttactggagagagaaataatctgtctttttaagccattgttactttattgttgttggtgatttttttttgttttttgagacagggtcttctttcatccaggctggagtgcagtggtgcaatcatggctcactacagcctcaatctcccaggatcaagcaatcctaccacctcagcctcatgagtagctggactacaggtgtgcaccaccaagcccggctaatttttgtatttttttgtagagatgaagtttcggcatgtttcccaggctggtctcaaactcctggactcaagcgatccacccgcctcagcctcccaaagtgctgggattaatggtgtgagtcactgagcccagcctgccactgttactttggcttttgtaggagccaactaactggtattctaactagcacaggtatcattgttgattctctggcagacatatttcagaattccaagagaccagatttgtagtgttctacaggaagctgtgcttttgtttgcattgacattccttttgcttattccacagcagacatggaagcaagacacaggtccaggatagggcgggaaagtggctttctcagtgacatttcagtgtgaatgagactgacccagggagtttgttaaaatgcagattacttagctctctcctttgggatgtgaatttgacaattctggcctgacccagagaatcagcatttgaaaagtattccacgtcattctgatggcagcccttgggccacactgaaaaaaaaactctggtctataagtggagcccttcaatatgcgggactcctgggaaatacttcagtgaattaactcaggaagattcttaactgctacagagatgctgttgatggtggtgtttagcagtctaggaacagcgccttggaaatgaatacttggaaatatttgatgggacactcagtgaaatgcagacatttggaaagttacaaagctttactctggatggcctgtaaataccacacacatgcactaattagataaccagacataattaaactatttggagacatgattgaaaagtaaatattttaagggacaagagggcaaattttaaacactccattcttcacgctcatttctttagttcacaatgttgactgagaagtcggggtaattacaagtggtaataatgcttgataattacatatttgcctctgtttacattggacatgaaattaggaaactcacttcctaagtgaacccttgtgagcatcctttcacagagagtgaagttcatatcacaatcaaagcaataagagggagtaattgtgacactaaccacaggaggaaaacaatcagggataaactttcagcccaaaggagtgagatggggactgaagagaggataaaagtgccaaccagccaaccagataaataataacattttttttgagtatctacattgtgcaagggccctgtgctaggaactatgtgggggtggggcagggtcagagagacactgaagatggagaaacttaaaatgtacctgggagccaggacgcatctgaacgcaaagttccactgtaagcgatgtgggagtagtgccaaatcagcacttcagggactccaaagatggagacgctggagagggtgcagacagtcaggaggagcttcttcaagtaggaagtcaatcaacacttatgagccgttgttggtgttggggatgcaaagatggccaggaaggagtccctctcctcaaggggcttccattctggtggagggagaccgatctcagaatactattactggatagaaatattgaatttgttaatcaataatagtaataattgattgctgttattgtatattgttggccagttggggtggctcacatctgtaatcccagcacttttgggaggtgggaggattgcttgaggccaagagttggagaccagcctgggcaccatagcaagaccctgtccctacaaaaaatttaaaaattagctgggcatggtggtgtgtgtctgtagtcctactacttgggaagctgaagagggaggatcacttgagctcaggataggagttccaggctgcagtgagctgtgatggtgccactaaactctagcctgggcaacagagggagaccctgtctcatgcatatgtgtgcgtgtgtgtatagttaatcacagataatcaatccatatatcagatattttctgatatggataagagctacaaaaaagctttgataagataaaatggtggaagtgagtggagctgagtggggtcagatggtggtcccaaaaggcctctctgaagagatgagggagtctgaggcttgaccctaaccaggagaaaatggcaggtgttgggtagctagggaaagcatttgcaggctcagtgtgccctctagatagtgaggaggccagcatggctgcagagtggtgagggaggggacagtggtggagaagggactggagaatagctagggcctggaggctggggaaggaatttcagggtttattctaaggatgcaggctattgtggagggtcttggggcaggagtgacatgatataatttgtgtgtttaaaaagaaaccattctggcagctgtgaggcagtaagccctggggctcaggcatggagctggaagatcagcaaggggctgttttggtggctcagggtgggcctggaaggatgtaactaggtggatgtaactaggtgaggctaaggggagcacgccacagggtggggacccagagcatgagcattgaggacaggagccagcagggtgtgtggggaaactgaggccaccagtcagataggggtggcagggggcgagaagagaaggcaacaggcgaagatgggcagtgccctcttgttgtttggggaaggagctcacgtgggaatttaacgtgagtggctgatgcccagagatctccataggaaagtggtcaggccttcacagagggtctttcttgctgagaaaaaaagtccagctggcctgtagaatgagggaggtgtgcacaggaagcaggcgctgacatgccatcagcccctctgcgtgacaggtgctggaattcagagcacactaatgtggtcacagccctcccgggtctggctcatcagcctcttcctttcacagaggagcacacccaagtccggggaggttttcaaaagcagcccagccaggaagaagccatgccagggtgaaaccgaggtctttctgactccaggtcggtcgggcttcctaaccagggcaccacagtctccatgctgaccagactgttttcctgcctgctgctattttcctgacactttcttccctttccaacactctcttctctttcctcttcaccgtgttcctacctagccaatgactactactatatatatatactatatatatagtttaaagtgtatatatatatacactatatatatacagtttaaagtgactgggatcttcaatcttaaatccaaccacaaaaacaaaaaaggaggtgtttgtccttggagtacatctctccccctggcaggggagaggccttgtgcacacatccactggacttcacacacgtgagctgagctcatgaacgttccctagactgtcagggctctctattttggaaggaggttgaggaatttgcccaaagtcacccagctgatgggtggaaattattctcagtctcgacaactcttgtgctttttggattttcccagcagcccatgctgctctgagccatttctcaagatgtctccttttccctcgtgttgcctgtaacactggtgacataaacctcacccttcttgccttactcccatctgagtagtgtctcagtgatgtgtgcctctatccttcctgtccctccagcctgagtgtggaaaatttttgtgactcccaatgcctttctaccccctgcatcttcttgccctcagcttctctgacatgttcaagaacaaacctttggcctccatacctgtgccttggagaacagatctatagcattaaaaataaacacgtggacaaacaaactgttccattgtatgctgctgtgttacaaatggcccctgagttgtgtgaaataatagccatgtttttaggctcatagtttctctggggcaagagtctggacagagtacagtgaggaggactcacctctgcttcatgattatctggggcctcagcagggaagacttgaatggctgcaggtaactcaagtggttggggactaaaatcattcttcattcacatgtctggcacctgactgggcctagctgggactgttgaccagagtggcttacgtgtggccactccacgtggcttgggcttcctcacaacatggtcgcagctagtcagacttcttactgcagacttgaggtttcaaaagtccatgttcagccaggcgcagtgactcacacctgtaatcccagtactttgggaggccgaagtgggcagatcaccttaggtcaggagttagagaccgcctggccaacatggtgaaaccccatctctactaaaaatacaaaaattagccaggtatgggggtgcgtgcctgtagtcccagctactcaggaggctggggcaggagaatcacttgaaccacgtaggcggaggctgcagtaagccaagatcacaccactgcagttcagccccgggtggcagagcaagattccgactaaaaaaaaagtccatgtgtccatgttccagagagcaagatgggaactgcatgatcttttgtgacttagacacactgtcatttctgacatactctattgttcaagacagtcattcaggtttaggtagaagtgacatagactccacatttcaatagaaggaatgtcaaagaatttgtggctgttttgaaactggcatgcaaataaataaacattttgtaaggcaaaaccgaacaagccccctgttataatttttaactcatcagaaaagtctccaaagtctaaaacagcagttcctaaccttttccacacaaagttctttccaatttaaaacacaacaaaaatctcccaaagaaatagttattgtttttttttagaaaaacacacactcatgacaaataattcaatacagctaaacacaaagaattaagcctagtccaaataatgtaaaatattcctaaaacctcatagtctagagataactgattgttaatttttgaagaatatcctttaagatatttctgtatgcatttacacacataaatgtatgaatcgttttacataaataggatcatcatattgagtttttctgaaatacgttctcctttttacactcaataacacgctacagccatttttccatttcttttttttcttttctttttctttctctttttttttttttttttttttgagacggagtctcaccctgtcacccaggctagagtgtagtggcgcaatttcggctcactgcgaactctgcctcctcaagtgattcacctgcctcagcctcccgagcagctgggatttacatgcacccgccactgcgcccagctaatttttgtatttttagtagagatggggtttcacgatgttgtccaggctggtctcaaattcctgacctcatgattcaccggcctcagcctcccaaagtgctgagattacaggcatgatccaccacacctagcccattttttcatttcaatagtcacagcagaagactattggtttctcacacagcagatattgtcccttctttttctttttctttctttctttctttctttttttttgaggcagggtcttgttctattgcccaggccaaatatcctcccacttcagcctcccaaatatctgggaccacaagcctgttccaccatgcccagctaatttttactttttttttttttttgtagagacggggtttgattgtgctgcccaggctggtctcaaattccttggctcaagcgatccttctgtcttggcctccgtacatgctgggattacaggagtgagccactgcaccagcctgtccctttctaccttcctaacaaaaaccctgttttaattcaggcatccattctcctttgagaggcaacatgtttccaggaaagcagacactatttctaatttctagtgtaaaagacaattgggcttagctaaaatagcagtccgttcccctggccagtgactgaggtaatgacagaatgtgacataattctggctaaagcgatggcaagactgatggcaggtttgggaaaatgggatccttggtgatacaaaggaataattaggaacagcctcacttctattcggttggtgcagaagtaattgcagttttgccattaaaaaccacaattacttttgcacctatcaaataccacatattgtcattcctgcacataatggttggaactacagcagtttcagatattgttgttttttttttaaagataagaaatgacttattgtttaatttgaattgattgagctgcatttttctgttgcttatagcccaaagtattctaactgatgaatgtcacacataaaattatacaaaattactttgaacagttccctattttattgtatggatatgccatcactaactctgtaaaattcccagttgcttgacatttaggctatttctttctttttattttttgctataataaacaacagtgatgtactttgactaattcaattttcaggcagtacttggtgtgtctatataacctccaccctctgacaataattagtttctaagccataagattggtcccactgaggcacagcttcttaaatctgactgttgggtctgagatgaaagcttgcagcctccaattatctccatttttcccccttcctccagtataaagagcatgggctttagaagcagacagaaatggttagaaatcctctgtcacttcctagctgcacagtgtcatcagtttccatttccctgctctataaaatgagaacagaaatacctacctttgttgtcaggactaaatgagatgatgtataataagcatccagtctgatgcctgatacacagtaagtgctgaaatggtcattattttatattttattatttatcatttggaagaatatgtgtgtggaataacacgaataggagctattacccttaagaagtgtctgtggaatgctgtttgctttctttccagagtggcaagacttcttgctatttttttaactttttattttgaaattactttagatttatagaagagatgtaaagatagcacagagaggctgggcgaggtgactcacacttgtaatcccagcactttgggaggccaaggcaggcggatcacttgaggtcaggagttagagaccagcatgaccaacatggtgagacccctgtctctactaaaacacaaaatcagctggatgtggtggcgcgtgcctgtagtcccagctactggggaggctgaggtgggaggatcacatgaacccaggaggtagaggttgcagtgagccaagatttcaccactgcactctagcctgggtgacagagtgagatcctgtttcaaaaaaaaaaaaaaaaaaaaaagttcctatataacttttactcagctttccctaatgttgacatcatctttggtacatttatcaaaactaacacgttaacattggtaatattattaactaaactacaaactttatttgcatttaaccagcttttacactaatgtcccttttctatcctaggacacaatccaggataccatgtcgccttcgggccagctggtttttaacggacttacagccctttccttggagggctgagttgcacacttctgctggaaaattagccagagctaacattgattgggtgcttaatgattagcccttctcataaccctatgtattccattcctgccctcattttacagatggggaaacagagactcagagaagtaggaggcttgatcaaggtcactcagaggcagagcagacaccgatgaggcagcctggttcctgcttagttgcctttcccagaggaggatcccccctggccctctccccagagcctgtcctccctgtgtggccaggaggagagaggaggtcctgcagcagggacagccttgcctgtgggcagagctaactctggctaaaactgagcactttctgcccaccgggccgggctctgaattacctcctcgctgcctgggcaagggcccgccacgcccctttctcccactcccttccctgtcaactctcggtctcaaggaagctgctgctgtcaatcctatccctgtgcgtttggccacaatgcaaaggcgcctcctggtgtttgcatttgaatagagacccaagcccgaagtcaaacaatgaggctcgtggtgggagtgggagagatttggggtagagcgcattcttgcagccccttctgcgcctccgtgaaggcagttctcttctccactttctcagaagtcttatttctccacttgctggggctacccctgctcctggggacaggaaggggattgcgtttcagccagggccccatctgcacagcctggggtcttctggcttcttcatccaggagcgctgtccactgccaagtgggaagaaggcagccagaactaaagcttgctccctgtgatccctgtgccatcaccaccgctatctcctaggtggcttctaatgacagctttcacataggaacaccttctgtgtgcctggcagctataggtacatggatcactttatgtgataaggaaatgggggctctgagctacttagctggtaaacggcagagcatggcctcaaactttggcctggcaggctccaaagtccccagtccttccagtataccaaataccgtcatgattgttttggaaacagggcccttgccaaaaccagcctcaagttcctggtgccaggagggccccacacctttctgggctaggcagtgtgtgggtcccgcctccggaagaccaggctggtgataaagcccctttctaaggcacccaaagggggctttttgctgagcaggcaggtgtgccatggtaagggcccacatcctgtcagggatggggtatttcctgattcaggtgacacagcttaaagaaggctgataatgaactgcatctctatttatccaggcaaacttggcctagctgaggtgttaactgggccatggaacagctttaatccttttgtttacattgagatggttcagtgaaactagtactgtcttaagctacaactgcatttcatcttcaggtctgctctcaggactgacacagagaccagctttgggtggaaataatcataacattcagagctgcaacctggggtgattcatctcagagtcaccaacaagatcgcatgctttttggttatcatgagtggcttcagggcgctggctgggcactggcagtttccactaacgaggacaaataagaacagtaaacaggtgttgagttattactatccaccaaacacttaatgtgtatgaacttaattgatccttttaacaacagcaaagtaggtgtcattattatctctattttttaggtgaagaaactgaggtacagagagcttaagaaccttgtgatgggcttcaggacattgctgcccccaaatatggcaccttgatatattgaatgtttcaagctgaaggaacttgagaaaatggcagatgcagttaagttcacacaacccttaagttgcagaagagggagttgaacccaggcagtgtggttccagagtccgggcatataatcattactctgtgtgcagataaatagcataggcagaggtctggagggacatagaccaaaggctgcatgctggctgtctacaggtgatttcttttcttttctatttatttgtcttcccttatttttgacaagttttgaggggagcaaaacgttaagatttacactagacaaaaggacaggtcgttagtgggtgtgagttgcatgggacaatgtactgggctccctcctgggggtgtccacagaaagccagtttggaaagacactatgacacaggtggacagaaggcagacaaaatcactgatacaaaatgaagggtttgcttattaactcattcacgtattgattcaattattcactcattgcttcaaaaaagcatggagagcctactctgtttaagcattgtagtgggtgctggggataattatgtgtaagacaagatccctaccttctaggggttcatagtctggaggcggaggtgaggggaagctactttcaactaagcacctagtaacttgttaagacataaagtaatttgcaagtctgattcttccacaaggttttgaatccttgagggcagggactggtacaatactggtatagccacatatttcaaccattgatgcattccatgcatgtattcatgcacttttacattaccacttggtgattgaacatacatagggtgtacagtgaaggaacagcccacgtgattgtttctccaggttgaaggagggagagaagagggtggttggaaaaatctccatagagatttgagcagaggcttaagaactgagaaagtttgccaggtgcagtggctcatgcctgtaatcccagcactttgggaggctgaggcaggcagatcacctgaggtcaggaggtcgagaccaacctggccaacatggtgaaaccctatctctactaaaaatacaaaaattagccagacatgatggtgggagcctgtaatcccaggtactcgggaggctgaggcaggagaatcgcttgaacctgggaggtggagtttgcagtaagccgagatcatgccactgcactccagccaacagagtgagactctctctaaaaaaaaaaaaaaaaaagaacagagaaagttttcacccagtggggaaggtacttccagggaaagggaatagcataggaaaaatcacagtggtataaggctgactggtgcatttgaagaactgtcaataattaagtcccaggagctaggacttaaatgtaggtaagttataaggacagagaaccaaagcagagagtaaggggtatatgtgcagatggagcctaggggataaggaagcctcctccttttcctccttctcttctgtttaataagccctccccctactcttttggaaaggagtgaaagggtaggaaactacatctttaagcatctatacatgccaagccctgtagcatgtataggaaactacatctttaagcacctatacataccaagccctttaatccttactttggcacaattcaccagccccattttccaggtgaggaaactgaagctcagaatggtgaagtgacttactcacacagtcagtaagtggcagaaaaaaggtttggattgaagtgcatccgattccaaaagcggcactctttgtactgggccagacagaacaactgaaagtggaatcacgcttttatctctgcaaaatgctttcatgtacctaggctcatttgattcttaccatgatattgagtagcaattggtcaagtatcataatttccatttttttcagtaggaaaactgagtcacacagaggttcattttgagtgatttgagaatttcagaattaaatacatccaaagtaccaacaagaggacccagctgaaaaactatacatgaaatgaagatcagccctgagatggtttctcagtgcaaaggggcagctgaggacatgacacatgtgcacatgagaaccttgtgtgcatgtggaggtttgcagctggaacagccggaggggccaatccaagtggctgagctaatcctttcctctgccttctgcctgcttcccctgtcaccttaggggcccctcctgaggggacatctgtgaattctccatggaatccctcatttagctcccaagacccagcgcaagcctgggtgcagaatgttggtgcaattttgacaagatgctcacagaggttcagtgactagttttaattaggccatctttgtttacgtttgatgtttatcagctaattggcatggcaaggtgtgagtcacacagctttcccctggcatggaatcagttgtcagagaaaaagccaggagaacaaatgatcccaattatgagagaacccaccgggctaattatcgtcccactaaggacggaaccttccccctcctgctgctcctgctactgctgtagctgcaccaagtgccctgggatctctacaccccttcctccagccccagaaacccagaaaccaggatctgggcccccagctggctgcctggagatttattctctcaaattcaaaacttgcatgttcctctagctcagacacaccagggcaacattcttcctttagttcaagatcattttcctctttagccccttccataaatgattgctcatgtatgttggacttttcctgtgtgcaaggcactgttggaaatacctgataattattttccccaataacgtacagtcaggtcgcattattatctccattttacaaatgaggaaactgagttgtgcagatcttaaataacttgtttgagggcaagcaatagggctgggatttgagtgacatgatctatcaccatggcacctgctcttgaccatcaaatgactcttggatgctcagaaagccctaaaaatcaaccaattaggattcttcaggtggatttctgggtccactctccctctaattatgtaggtacaatcgccttctagaacagtgctgtccagaactttctgcaatgatagaaatgttacactgtcctgcccaatgcagtaggcagccactaaccacatgtgaaatgtggcaagtgggatggagggactaaatttttcatttcattttattttaatttatcttaattttaattgaaagagtcgcatatggctagcggttaccttgccggaaagtgcagttctagctggtcagcccttagtcctcaaatgctgcaatttcctaatcagtcctttatgtgtgtcttttcctccccctcctccttctgcagcttcctggctttcttggtgcagggcaggtctcttcattttctgcattctctcctgcccattctctaagccccctccaggctgaggggcttgtgcagaggaatgcagtttggctgcccttgagttgaatgatgatcgtggacctttggaatgtccacaaagcctcgcactctcggcctcccctgtctctctccttcgccggggtaacagatggccctggctttcaccagccgggcctgagcacattgtcactcccagctgaaagtgaaatattcagtggcatttaaattaaatagactctaatgcttcagtaatattaattacgttttcattcatccctggcctaataaatcaatgcgtaaagagaggatgctcgggaggctggcagcctagtggggccactggtcctttgtgtgagcccgcacacaatgcccccattcttacggggctgcgcttgcccctgcaaacatctgtgctcagcccctcttgaggaggagccaaagaggtaacatttacactctgctcctccaatttgtccctgcaccagggcctgagtcaacgggaaatgtgaaggccacactgaaaaccacattcagagctgctgctgctgctgctgctactactgtgtgtgtgtgtgtatgtgtgtgtgtatttgtgcacacatgcgtgcacatggagctggggggtttgcaaaattctgaggcagagattcagtgaatggagacaggagtctattggtgctgggacctcacttctagctgcaagattgtgttagttcagccttaacctatgagaagaaggagaaaaggaagaaagaaaggaaagaaagaagaaaggacaggaggaaggaaggaataggaaggggaataataacagctaccattgaatgagtgcttactatgtgccaggaactgtgctaaacacttttatgaaaattctcttatttattccttacaacaatttataacataacatagcaactattattggcccattttacagatgaggaatttatctatagttcagagaagtttgggaacttgcctatggttccaggccatgtctgtttgattccaaagacaatgttctttacctctaagttctacatccatcagaagaaaatacagaagaacagaagagatctctaaggctatggtttgtgtagggggcaaggggccaatgtttgagaaatttccaacattccccttggtttctgaggttttttgcctgtggggaggtccatccccaacgagcaatgtctccacccccgctccagggctatacatatgtaaaagaagccaataaaacaatccaagagagcctgctctcctaaatcttcaggggacaaaacctcctacttgtgatgcttcaaagctgtccagagctaccagtttacccccagaagtcccgactcaatgcctctgattggaaaataaatagctttgcacataaaaaccacaggccaattgttagcctaggaatgggaaaatgctgtgtgcatcactgcgtatcagccctggagcctcactcctccagggaggcagcctctcctctaggagatggcccaggagctgggggtgaaggcacttgtaaacatgggagtttcaaaaatgattccttaggaagatttttaaaatagtcaatgttaaaatctacaagaaatcgtgtttcttatagaaaaactagaaaatacaaataagaaggaagggcaaacatcagctgaattcttccacccagagttaacacttggtgtttttttcctctagaaaactcactctatcactacttggcaaacattgggccataagattcaaactgttttgcaacctgctttcccccaccatttactgtgatccaaaagtcttcccatggcattaaatatgtctctccaacacagtcttcttaatgacaagttttgcaacttataggtaaaacatggtttggttatttaatcagtcttcaattattggacatttggacaatcaaaccagaaagaaaatagaaaccggggttgtttctattttttttcctcccacaaagtttactataatgattttccttgtggctaaatggtagagcacgcacattcccacttactctcttagaataaacaactgaaagagaaattgctaagtcgaagtgaatatgcatgcatattttgagggcagagacactgtctactataatttgtaaaaaatgacttggaaagctaaatctcagcttcagacccaattcctacccaatgtaaatattcctactctctgatgcttgaggctggtttgattgtacaaaaccaagtttggaactttctggtcatcttgttggtaggttaggactcagcacttgcagcttcattgtgagggttcttgaacctcaaggtagaactgacatcattaatgtcccacaggaagcaactgagtagagtgaccagcctgtgatctctggagtcagcctagatttaacaccagctctgcttctgactggctgtgtgccctaagggaaattacccagtctctctgggtctcagtttcttcatctgcaacctagtgtgtgatacttgtatccatcttatttcagtgaagattaaatatatgtaaaacacttagcacagtgacacgtggtaaatgttcagtaaacatttgctactacgctgttattatgttgacccactaatgagctattcaaccaacctcttagttattcaagtcttggttttttcttggagccatcaggagagaccatgaattgcaccctatttaaattggcctatatcacacagaaggtgatttaattcaatctaatactgattgaggtcctggcacgagtacggccctgtggtagcaagatgaatgtgtccccaggagctcattggctagtgggaaagccagaaacatgcatcggtaactcagatccaaggcagcctgttgccagcggtgtaatgagaggtgcaaataatgcatgtggatggggcctctccagtggcatcaatgggaggaggatttgaagtgatgctcagggaggtccaatcacttgtccaaagtcacacagttactaagatgtggagctaggattagactgtaggtctgtctggtttaaaaaaaaatcatgcttgtttcctccatattaataagcaattcaaggtcaaagtcactctagagcagactagggctgtccagtagaacttgcttccatgcatatgctctatatctgtgctgttcaatatggtgaccactagctacacttggctactgggcacttgaaacatggctagtgtgagtgagacactggattattttaaattttatttaaacatggctagtggctactatgttggacagcaaaggtttagatggaggaactaatttaagagaagggctaatgttaaagatcaaactattttttttttcttgttatgagacagagtctcactctgttatccaggctggagtgcattggtgccatgtcggctcactgcaacctccacttcccctgttcaagcaattctcctgcctcagcctcctgagtagctgggactacaggtgtgcgccaccacacctggctaatttttgtattttttagtagagacggggtttcaccatattcgccaggctgattttgaactcctgaactcgtgatcctcccgcctcagcttcctaaagtgctgggattacaggcattagccactgtgcccagcccaaactttttaatgacaggaaagtgagagattttaaaaaataaaaagtaaaaataaaggcagactctaatttgaaaggaactgttaataaataaataaataaataataataataataataataataataataatgttttcatggaggccaaatatttttccacccttggaggaacacatgcatttggttgacgtgctctgaccatgccatgtttgtggctctttgtcaaacagtttggggccaagccaaagcccatggggagggctccctttggcaaatgcattccctcttcttctctgttttgtatttggcattaaactgagtaactgtctcatgctgaaaccaccacacgtatctaattcccattttgttctctgtcagattcaggcagagagctgatagaatagctgacactttcaagtcagagaaaacttcctatctgtacttctcaatggttggagctgtgcaaagacacactaggcagcctttgtggggggagggtgagtctcccatcaggagaagtgttcaagcatgcgttgaacaatcatgggtatgttgtgtcaaggttgcaaacgtcaaaagagagaggagaggtagttggaataaatgaccctttatgttatttctagcctctaaagtcagagcctttacaaagacttttgtacaaatgattttgctctgtaaaaacccttatctatctataccccatagccaaggttagactggtaattctctgaggtcaaggctgtatcatagtcactaccgtgttgttgaactagccatggtacttggaacatgagaagtgttcagtaaatactggttgttgtggttgagagaacactggaatcttaatgtcttaacctaaatattaaatggtagtcttcatttgttttgatgagagagtggatgcgaagtaaattcaatgcaaatttgggtctgatctccaaaaggaccaaacaatcattcccccttgtgtgctcagtcctgtgagattaaaaaggtagggcgagaactcacaattacacagtgtctaccaggtgctgagtactgtggtaggtgcatttgcatatatattatagtataattcccaagacaaccttggaagaggaattactgtcccattttatagataaggaagctgaggcttgacaaggaattattacaaaatcccattgatagtaagtggctgaggtaacaaacagtcaacagcctttagttctaccctaaactaatttatgtagcagatgttacataggagggatcactgaaggtaaggacatgagactgaagagacatcttgggcaaggttatggacatcttcaacattggagaggtgaggagatgccttctgcctctttgccagagagaccaccatgtcttagtgaatcagaatgatttaggaccatagtagataacatcacctcctcatctcacccccttgcccaaatccttacaagttcttatttgccaatgggaacccctcagattggcttctctttctctctctctctctctctttttttttttttttttttgagacagaatctcactctgtcacccaggattgagtgcagtggcgcgattttggctcactgcaacctccgcctcctgggttcacgccattctcctgcctcagcctcctgagtagctgggactacaggtgcccgccaccacacctggctaatttttttttgtatttttagtagagacggggtttcactgtgttagccaggatggtcttgatctcctgacttcatggtccgcccaccttggcctcccaaagtgctggggttacaggtgtgagctgccgcacctggccaggttggcttctttacacttctaaggaattacttcaaatgcaagacctttttttctcagtttcttttcattggccaatttttaaagcccactgtagatgtattaaccaagactctttctgttacaagtggcagaaatccagttcaaagaggtttaattacaaaagttgttcatggtgctgaatgagcaagacttcatggatgcctggatatgggtgctcacatgatggtattccaaatatctctcaggtgtcttttggctcttctctcctgttttggatcccttatcaggcatggtcaccagcagttccagatttacttcttagtatcttcagtagaaacagcgaaactttcccccagttgttctaacatggaaagaaatgaagcacatgaaacaatgttgaaactatgaggtttgcactggatctgatagatgtcaagtactgctgtgtttctcttgaaattttaaactctccgaggcagccctgagtgttctctgtggcatctcagtgtgcttcatcatacagtttgggatccagtgttgttgggtcactgtctccccttgcctgacctgctgctgctctctgtcctaattcctggcctcagcccttcctgtttgtagagtagtattttgaatctcatcctcgatttttattaatgaatcaccttaagcaggttacttgttctttccacacctgactttcctcattggtaaatggtgattgtactatccaccttggagggccattgtgagaattaaatgatattctctgtttaatatgctgagtgaagttccccaaacacaatcagtattcaaagttgcagctattattctccttgtctttcttctacatattgttattactatcactacttggagcagctatattagttggcattaggcttatctgtgaatggcagtaaaccccacacaagtagcttaaagacaattggaggtttatttctctcacatgcaaatatccaggaaggtggtccaaggctggtgtgatgttacctagtgtcaggagtccaggctctttctgtcttatttatctgtggttcataggtccattttcaaggccacctcatggcccaagtgggctgctctagatccagctcttatgccccccttccagccagaaggaacaaagaaaggggaggagaagttcacactccctctcttcctggaaggtgcacaccccaagcctatacaactctcattgccagagcttgtcacacctagccgcaagggaaatggagaaatgtagtgttattctgagtggccacggtgcgcagctcaacgttttattactatggaggaagagtaggctctgccactgcaggactagaaaaggaccctagaagctggactgaccccagatgatgcagctccgagaaaactatgcttctgcttaaagggaaatactgtacatcttttgccacccgaggaatgcaaaattcccttgggaatttttaagaaagctggaagttaaaactcaagtgtgaagctctcttccctgagccaaggagcttagttcagtctttctcctctgattgccagccggggctggggagaggcagagcactggccccaggcaaacttggtttgaggccaaattccaggactcttggggctgactggcagccactctgtctgagcaacctgggggatcctgagaaaagaatgaacatccgaatcccagaacaaaatcagcaatgatgatgctcctgcagcccgggtctggctgggaggccacacagtggggaggatgaggtcatggtgacaaatgagagaagggggagggctctagagtgcagcaagtctgcccaccagccagagccgggtgctcagagcaaagccagcccctctcttgtctgccactgctctcctgtgtgatcgtaggagagtcacaatgtttttggacttcagtctatccagtgagaagataggaaacacagcagcagcggctaggttcaggaatgtccagaaagtgaatagaattattaaagaaaaaggggcttggttgctaggggtttgggtggagcacagaggatttttaggtcagggaagcttttgtgtgacactgtaatgatggatgcatgacattacacatccttaaaacccttaggaagtatagcaccaagaggcaactctaatgtaatctatggactttgattgatattgacgtgccaatgtaggtttatctattgcaacaaatggactactctggtggggcatgttgatgatgggggaggatgtcggagagtgagaggagtatgttgaaactccgtgtattttctgcttcattttgctgtgaatctaaaactactctatcatctagtccaaaagcctactttagggctataaagacaaagtaatcagatattaagtaaatagtgatattttatcaaggatgatgtaataaaagagattaaggagtccccccaaacattcgtgtaccatgaaattgctcacatcttggtgttgagtggtcccgtccattcgatgggtatggtagtttaatttggaacttggagggaggaagtagacaaaaaacactgcagttgcattttctgcatcgcattggtatacttttaggtcattccaagatcactgccttttaagatttaggagatacagttaccttttgatgatctgcaagtgcttttgttcagcatgtaggtttcctgctttttgaagaaagccaggattatatattggcctgaagacagtgcagcaagaagccctgcgctagcgctgttgtggctaaaatggtggtggtgcatctactgtccaatagaactctctgtgatgacagaaatgttctaatttgtacttctctgatgtggtagccaccagccacgtgcagatactgagcacttgaaatgtgaccagtgcaattgaggaactgaaaatttcattttatattaatatctttaaactacaaatttaaatcattttattttaataactttaaattttaatattttaatacttttaaatttacatagccacacatggccagtggccactatattagacagcatgggtctagggctatatccttcagtagtgcttttcctactcacctcatggtttctcaggagtttgctttgcacgtttctgtgtgtctgtggagaggagggaatcatgtacaggaatgctgcaggaattctaatggatatgccaaaggcttaccctcaacccacaaatatctcagacccaaaatgctggagcatcctactacatatctacctttcacctaaaaaaaagaaaacatacaatggaatccaggaaacaaggcagggattatgtagaatttcttcgctgtatatcttgttttaaaaaatacgtcattacatttatagttgtattatgtataatgggtcatgggatcaaactgaggtctaaggctagtcctggcttttgtgtctttcaggatttaggagatacagttaccttttgatgatctgcaagccctttgcttgctgccttttttgctttgcttgcctttgctactaagttgttgtctggcatgtgacagccctcctggatttcactttccccatggttagtaaataaaatgggataaacaacccgtcagctctctgatattatctcagatctgaacagaatatattattttttattaaaaaatatggagacagaaaactttactttagactggtctaaatctgtagcagattattcaaaatgcgtaccatgttctgcagtatgttgcaaaggagaaaagggcgctgtggtgcaaccagcttgggatacacaggttaaggttacataggtttcttgattttaggactcctcaaagcctttaatattctaatgtgcattatgacttttcaggtggggaatccagctgctgcctttctcaaaagaccctcaaattatttctgctggaggagtgtcttccaggaaggactaatggtttgtggaatacactttgggaaatgcttatcttgaggcagcatgagtgttttttcgggactcagctgtctccccaactttggcctgtccttgcctgtcatgcggggcatgcaggaatggaattctgcacatggcaaagggctgaatcctgcttttcttcacacaggtgcagctccccacagcaccagctctccagctgcccccacacagcctgttttgtgctagggctatcgcgatttgcaaattccttctctagctcaagtgcatggacccagaaaatgcccctgcttgagggccaatgttgaccaaggccctcagcagtaatgtgacctctgtgggagcagcacctcgcagagggcagagtttggctctatgcttgtaccattggtggtaaattctgctgagctctatggatccatctggatgaaaaggtctgtataaatgcaagatcattatcatcatcagctgtcccagttggagcctactgattctcaagcccacagtcaatggggcctttccaacaattccattgtacatggcttggaaaaggtgtaattacacgaagctgaatatcttctggagagacagacacgttcatgtctgtcccaggagtgttggagaggaatctctcaggcctctcattaggcacatggagagaggtgccctccaggcctggcccaggtcagggacaagtcagaagctacatctggagcagatccaggatcttatcctggtgcacacgaggggccagcatcgtgcttgcacatttatagctcaggtgctctctggtgttaccaggaagctgctgggaagagacggaggccggagagtgtcccaggacaatgcttccttcactcatgttcatttttaactttaaaaaatggcctccatgatccccaaaatggtcttttggtgtgagggaagtggttgctgtaaggaaagtctctgctcgacacacacaaaaattctcctccatgactttggaccatgtctctgataaaaagactggctgggtgaggagtccagcctgcagacctcccatttgtcctgagtcctctgttgcagtggtcctcaatccccaggttagggatcagtaccagttcctcttaggaactgggccgcacagcaggaggtgagcagcaggccagccagcaagcattgctgccagagctccgcctcctgtcagatcagtgatggcattagtttctcgtaggagcgtaaaccccattgtgaactggccatgtgaggtatctaggttgcatgctccttatgagaatctaactaatgcctgatgatctgaggcggaacagtttcatcccaaaaccacccccgcccactgtgaactcagagagcacctcagcctatggtcaggtaccatctacagcacttgtgccttaaacacccatcagcagatatgaagatttcccaaagcatgcctcaatttagggttgtgcaaactagtgtagcctcttgcctataaatgaagactaagggctccatccaaccagctcgcttgtctgggtccagtctccagaactcttccagcttccctgtagtaaaagaacacaccttggtgggcattgttcatttatcagtgcacagggccacgttgacaaagtcttaatatttaatggcttacgagtctaataataaaaaaattaaaactctatctctcgttgttcttaaaaatgagcctgatttatcccattcattaggctcttatgtctctgtctggaatcaagatgtcagatctttagcctaagtaacattaagagtaaggaggataatgcaaataatgcccaaggttgcccttaaaaaatcgtaaagaaatgaataggctatcccagctttactagcacatatttcacaagttgtgcttagcaaatacagtcctcatgagtgccaccttttatttggcagtaaaacctcctctgatcccatctgcaaacccagtacttagcatggaaggatcccattagctaacatcatctggctcaggagcgccctctccaggtgctgattttcattcatatcccagactaccaggattgcacttaaggtgggtggatcacgaggtcaagagattgagaccatcctggccaacatgttgaaaccccgtctctaacaaaaatacagaaattagctgggcatggtggtgtgagcctgtagtcccagctacttgggacgctgaggcaggagaatcgcttgaacctagaaggtggaggttgcagtgagccgagatcacaccactgtactccagcctggcaacagagtgagactccgactgagaaaaaaagaaaagaaaagaaaaagataggggaaggtgaggaaagggaagtaattatgttattttgagtctagtaggcactggatgaggtgctcatatgtccttccttaagcctcttccacttgaccctcaacacctatccaggaagtaaattttattatgctggttttgcagatgaggaaactgaagtttgcaggcattaagtaaagaatccaagtttccataaccttggaactggaattagcaggatgctgggattaatgccaggatgaccagcttctcattctctgttcttctgactatcccgcacatgcgccctttgccttttttgtctatttctgatgttaccactcctactcatgtgacctaagttagtagttatttaatttctcctaacctcagtattctgacctattcaatggaaatagcaatatttgttccactgccttccttgattgctgtgtggagaaaatgagataatatgtgagaaagggaaggagagaggctttctctgcttctttctaaaagtttcagaccagttctatccaactcagtccaggaagggagaatgactaagtgtgtggagagaatgctctgggtgagtgtgattctagagtaacacatcagctgtttatactccatatgagcacatctcaaggtatgggaagtttgttgggtttttttgttttttaaatcccacacctttaagatgaaattctgtcccactgagaccctgctgagcagaaaataataggtatcaaccacctttcctcaagcttcctccacctgaagcctgagagcaatgtggctgaagggggacaggaggtgtgtggtgaagggatggagaggtttctagcttgaatgattttttcactaggtc

SEQ ID NO: 433 - DNA, 328703 bp, Homo sapiens
  source 1..328703: mol_type = genomic DNA
gagttgtcttgttggaatatgtacccttttaagcacctcaagtttcctttcaaactggacaggcaatagacacataactaatttttaacactattcacacatttctgttagactgaagcagattgtgcagtggaaatactaggcctttggagggagtcacacttgggtttaaattccagctttgacacttaataactgtggaccttggacaaattatttaacctttctgagttccctctctgtaaaatggaaataataatccataactcacaaagatgtcttggggattaaataaaataactcatgcaaattacttggtgcatagtaggcattcaataaatgtcagttcacttctcttcccagttaataatgcttattagactatattaaaaactagaactagactgtgataatgcatttctttattaggtatttaagccaaataactaatttcccccgggggaagagagagaaatgttgaattagtttcatttggtgaacttatttattaatctttctttttcttgagcatttttcagtttcatagtccataatttagttttcatgcagcaaaaatgacacagtttggtattcttttcacctttactgtgctagaattgtttttttaaatgtatctattattacatctgccacttattagagatctttattaattatattaacagctcgattgtgtttcataactacgtcgtgctgacaaacttgtgctctcagcagtttccctgaggtctaagcatttaaaagaatcaagttttaaatgacaatgccacagcaaaagaaaagcaggggtgggcgggaagacgcacaccgtctgtgttctttcgtgttaattttatatgtttgcatttaagtggagccacattttcctcaaggacgcaacctaagtaaggcgagcagggaaagtggaaactaagtgagctggaactacagtaccattgcacctttaaggactggagacttgctattagctcggcctccttcccggcccacctctgaactctgattgacagggcgccgggcgaggaggagctgaaggaggctggagaggaggcgccgtgaggaaagtaggggaggagggggccggtcctttatctggtggccaatcagggaagcggggaggagctccaggcgccctcctccctcctcctctccccagcctcccggcttccccgccccctccccttccctttgccccctcccctctcctccttctcgtcctcctcctccttcttctcctcctcctcctcctcctctcaggctgtggtttttctgtatatgtttctggagtcctgagcctgagctaaacaaaagcaggaggctgacggggctgctggagtttgcagagacacggaggaggagagagcctgtgctttgcctgccgccgcggctgggggagatctggcttttgcaacagcccaccccctttgagatcactctggcccggagtgggggtggggggcagcggggggtggggggggaaagtttgcattgcaatccccctgccttcctctcctttctcccgatcaatgcatatttgcaaaaggattaagccacagatttaagcgccgggagcccatttctgccttgcaaaggagaccggactgaaaaacctaaagccagctctgatttcttttcgccaagtgggaaggtggtttatttttcttgctttttggagtcaacacccttccccaccagcccttatccccaccctcaccccgcaaccccttcacgccccctccccctccccctcctcatcctcccaccatcctctaaagaggcaaagggattttttttttcttttggtcttcttttttcccccttccctgtttatcctgaaaaggatttgaagacaagcttgaaggataaaaagccttggtgcttcccaggagccgagccgaggagcagaagaggaagagccgggggctgccgtagcctttggagatggacgagcagcccaggctgatgcattcccatgctggggtcgggatggccggacaccccggcctgtcccagcacttgcaggatggggccggagggaccgagggggagggcgggaggaagcaggacattggagacattttacagcaaattatgaccatcacagaccagagtttggatgaggcgcaggccaggtgagatggaggcttttcttttcctttcttggggttttttgtttttcttcctcttgcagggggaaacaatgggaaccgaatcaccacagcgctttttttgaaaaatgttatttcttttctcattttgacaagcaactacatggcggaggagtaaaatttgaaggagcgttgttatcgaaagtgtaatcgcccatgccgagatgtggctgtgtacatatttgtgtgtgtgtgtgtgaatataggggtattcatttatatccacacaaacacacaggcatgccgaaaatactgccaactgatccaaaagcggccctcggcactttttactgctttaaaaaagtatcagagaaagcagaattgtcaagttttgaacagcattccatgccttcttgttgaggggactctgtaacattacgaaataaaatgtcccaagaacactttatttgcaaatttagttgactccttacctaattcagcgagtttgattttctttcttgactctcccgtccaaaattaatttttatcttttctcctttcttccccccctacccaaaatacaaaacaacaaaaaagcagggtatttctttgtcagtacttgtcagctatccagaaaatattttgcattcacttaattttgtttttttaaaaagttgatgaaaaggtgattttgtttttaggcatatttgttagttttaagagactcagatttttagtttaactttattgtctcctaatttcagccggtttactaaccttccgtgacacagacagctatgtagggtcctttaaaaaggggtggggggacaaaaatcaagcatgctcttttcccccatgcttctttcaggaccacttagaaatgaaagcatttatgaattttatatatttcagtactataggacatgaaggtcttcattaaggaaacataataaactgtgtagcctctcaagttaatccactgccaggtatatggttctctacttcaggattttacagtaaattctcttttaaagtaaaacatagactaagtgacaacccgctaacagcttgcccaaggccgaactcaaaaggaagaattttaaaaatctaatgaccacatatgtctgtacaattacccagctttgttatatctccgaagtagcgtttttctctttgaaaaccctgtaaacaaatatacgcaactcctatacttcagatgacttggttatatggagaagacatcattatgtgtatttctgtctacgtgaaataagaatctgagttgagaaaatgagaggaagcagttaaaaacatagatgttatgaattatactcaattttagctgcaagcacatgcaacatgtaaactcaaaagtactaaggtttacgggtgtttgaaaacttggaaatgttgaaagactcaaagtatcctaagttttgtttaaataggggaaattttaaaaattaattggtgctctctttgaattttattatctgaagaaaagctaataggtatggtaagaggaagatttcccactggcaattctcttttgaattggaacatttttctctattatattgttctagaagaatactctcagacataccaataaactggcttaaaaataagtttgtgaagtggaaggggctagtaagaatagatactacttttttgatgttcagtctctcttcttttgtgaaactgtggacaaacagggcttggcgacttccccctttcaatggcctagatgcagagagagatcagatacaattttgggatggggaaattttcagttcttcctctgtagctggctccatttgtgtgctgtggaaatacaatatttttataaagctgtgtgagaatttttgtttgcatttgggcctatatataataatagaattaattaaaactattttaaaagacccaggaaaggtctttaatactttaaagtattttccatctttttttttttctaccccacatgagaacttactaaaatcaacgctaagctttctttttggataaacaatgtaactccacttagtagatagtatgtccttttttcctttttctagtcacacctttataatgtgtatttattatttacaaaagtaaaccattaatattttagatataatgtatgtgttcattttgatagtcctgaattttgactttattactcccctgctgtacagtacatagggcatgtttctgatctctgttcttcatgaggatgtgtctattttttaactttcaaagggattaaaaaagaattgcatgtgttttgagtgccagaactttccatttatctttacacattaattttagttagtagacagaattcacttaactaatagctgatatgatcagtattttgtttccaaaacagtatcattctgctaagtggttccataataaaatagaaggaaaggtattgttttgttcctcaagtgcattcagaatacacacacacacacacacacacacacacacacacacacacaccaggtaaatcactaatctaaaagacaaaattgcatttatttttcccccaatgggtgcaaggtcctaattgtaaataattgaatttcaacacctgcaaataagcagtgtgtgcacagaagcataatgtgaacacagagaaatgaatttattccccatatgggtatgtttgccccctggcaatgcatttccatactctttaacttggggactgaaatgttataaattgacagttctactcagaagacctttcaagcatcttgtgtttatgagaatacaggggcatctgcggaatgaattcgaacacatggatgaattaaatttgaaaacacacagaccgagaggcagacagttcctaggctgtggtcgttgcatggattttacaaaactgttaacctacacctttggctttgctgtgttcattgtcctgggaagaattgtgggtttaagaattactctttgattaaactacttaaaaaaaaaaaaaaaccctttccctaaatgggcataatttaggttagttctgttctgtagttaaatccctaccctctccctgctaattaacattatttctttttctatggcgggactctgtatattaagtcatgaaaacaactgaagcatgccacagagttagggttgggtatataattttgtctaaatgttcaaatgttttcaccctgtgcattatcggcagtttgatcttgagagtccacctaagctatcatgttgtttctttcttgcagaaaacatgctttaaactgccacagaatgaagcctgccttgtttaatgtgttgtgtgaaatcaaagaaaaaacaggtaggaatgagattccaacattttagcattttctttggccaattaaatcacttaaccagcagtcacaaatctattatttaaatattaaaatttcagaatacaagtactatgaaggttgacctcatattcgaataggaagtcctagccctgctttccttaaaaaaaagaatcaagtttctttgacagttattatcaagcactactggttaattttccagaactctatttccagcctttttgagattggggctaaaatatagattctgaaaggaaatttatagactgatgtatctttggggcaaaaatatgaaagtaaaagttcatttttttaaggaatatattttggcccatttttaaaaccctaatttttttggagttgggtgtgggggtgctaaactgttgaaagtttcctttcctttttttcttgtaattacacaaagcagcagactagaggttctcaacagagagtgttgtcaaatacctttgtggaatgcgctatacaacattaggttatcggtatttgagtggcctgtgattttattgcagggagaatcgttgggtttaggagagtataacgccatgagataattcactctgttgtttttctactttctagacctcgtttcgtggactaacacacttataacacatcccaggagggcatttaaattttaaagcaacaattaaaaaatagcagtcatcaatcagaggtgttcttaaacaacagatgctctgggaaggacatttagcgacatccccttgtttattttaatccttaattttccaaagtgggtaaagctctcccttgtaagaagaaagatttgagaaggcaatctgaaaccagggaataaagatgagggacaaggggtggttatataaagcgggagcttctgctgggctctgacttacccgctcgctttagagcagtgcaaagtacctgacatcctatttatttatttattttttacaacaaggagtgtaacagtcaataattcatatctaaaccatataagcaagggcatgacatgaatgaaagtgacaataaatatgattgcatgcttggttgatatacattgatagttacacataaaaaatgggcggggggagagggcacacagggtggctttctttttgagagctctctgtgtttttcttttaaaaaaatagtttcaagatgtgactgttgaatgaatatgtaattacttgggtcttgaaatgcgtgtaaaattagtacgcagctcctttgttgaatgttatttgtgttgtgcataacattctagacaaagcacctgagaagtgatgttcagacctctaagtcttccaggttgccttgccaaagcttaaccttattgcaaacctgttaattgcattattttagctgtgagacaacttttaaaagatttatggactgtgcattcaaatatcaaaagagttttttccagtttgtcacactttttagtttcttttttctattagcccagagtaggaaacttaagtgtgtgtgtatatatatatttatatatatttttttatcttctctcttttttcttctttgatctctgatgcttatttactttgagtgtttggtttgttgagatttgtttctaaccaagtatgagttcctgctgatcttgtttcatgaaatgtagaatcaaaatataaaagcatatgtgataatatggactaaagagagtctatttttgaagatactttatcagatttttattgaaaggaagcctgtcagggcacttaaatgtacattgtggccaaagtgcttaattctagtttcctaattaaaacctactgaggcagtagattaaagtgggtgggtgtgaatagagatccggttcaggtgagggttaaagagttcgctccttgttcatgttggctcaagtataatgataggaagtaaagtagtcagtcgtattggtcaaagtaacattctaaaagttttgtattttaaattttgtgtcaatacatttaatgtttagagacttaaaaaaatctaaattaaggttttttgtgttgtctctagaataacatatttaaaaaaacaatttacaaataatgtaattgaaagtgataagagtcattgccccctgtgttaagggacacacacacacacacacacacacacacacaagtcttggattaagagggcacccctgggtgaaagtaggggaaaaaaaaggcttacctccctcttagtcttcaacttgtgtgttggaaggattgaagggaaggcaaaaacctctcctggaatgttgagtgttgtgttaaaggtaggagtcaactgtggtctgctgaaaagaaccctttgattctaaagcacgattacttggctactcaagaccctggaaccttcaatctttttgccagcatatctttcatgcagttgatgggtcggaggaacaaagtgtctgtaaagttgcaggagcttttttttttttttccccctcttcttcttgatacagagctggtgaaaacatcgcttgagtgatcagttcacatacattcctttattgtttggggactttttctattgttactttcaagcctttttgcattaaatgagtatttttgagtttccatctcaagcattataatgcttataataataatagaggttacttgatttagggtgggctttgtttgtttgtattctaacacgaagttcatacatttggctcacctaggcagaactcttgagaggaacttggtaattgcattgatttgttatttttgcttttttgcatttgttaatgattttatagttggaagacttagaaatagatacaaaaactggctaagatgtattaccaaccttttggaactttaaaaatacatacacacatgcacgtaacaccccaaagtagaaggtgccatctgaattacaattgattgatgggtgtttaagtcagaaattactgtggggatatttaaaaaacaaaacaaaacaaaagaacccatgcatcttcttgcttcagaatgtgggtagtttttattctgatacattttcgcttttaaaaaaataaatgctaagaagaagtgccagcaaaatgctcgggtggcaattctcaaagagcagctaaaaaaccctgtcaagacctatagcaatgtatatttcacatgtggcttttatctgctcgctcattctaggaatacagagacaattagagttttggatcatttaatataacactttcttttggatttttaagatccattccttgtcttctggcatattagtaataggctaagttttgcatatgtgtatatatggtggtaatggggttggtgggatagaagaaaaggagaaaaagtcaagcatattacatttctttaaaaaaaccttgaatatatttttaaacatttcctgatgttttttattcctgtgtcaaaatcacgcaagtttaaaaattaggaaaacacgaaaaatattgaatgccatttactaaggagaatatttatagatagcaatgaatagctgcaattgttgtgaatagtttttaattttagaacataatagctatatatggcacttttcagccaattttcctctgtgcattgtctgcatcaaagttaacgcaaatcaaatctttggaggaggttaaaaaaatttattttttgctccttaacacccttttgttctctctctttccttttctctctgtgttcaattaacacccccatcacagaactgtagtgtgtgtgtgtttttttaattctactactttatttcacttttgacaccctcccttattattctcgcctgccacttctttttaatatagcaattacattatgggacttctcctctcctctcccctttaaagcattagagaataatttgtgtgtctatgtatatgtgtgtgtgtatgtttgcatatgtaggtggaggggcggtgggttatggaaggaagctagagattgcgggaagagaattctgatggtattaggccttgagcaaaataggagtaaaataactttaaaccatttagaagcagcctctgatcagattccttttggggttgaagtggtaggagtcatttttgtagaaggtcatcgatagccagcaaatgcaaaaacttttcttgctgatgagaaaattcaagaatttggttcattttttttttttctccctcctggtaaagatgcagaggaaagaaaaggggatcaaatgaaaggaacttacaaatcagttttacctgatgctatctttcaggtacagtgtgttaaggcagaagtaatgtggttagaccctatattatttatttattataatgtggatataagccgtagacctacaacaatataactctgacagacataatataagaagaacttgtaatgagaaatgacttttctttttagtcacttttgtgtattccatttttagtctactactagaattagaacaattctggcttttgagaagtgcaaagagcaatttggtcaaagctgccagaatgagaatttgggaaattttggtgtcatttttttctaacaataggagtgtctgtgaggattggacatgagagcgatttaggttatactgaaggatctggaaggggatttataagcggggaaacatagaaccttgtgaactaagagctgtggggcattgagctgggccgggtgtgggtgggttctgtacagtaggctgcactgttggctgagaagggggcattacctgcctgtgtgtttagttcactgctggtgccagacctattcacatggttttgcccctgcattctgttgacatccatgaactttttgttgtggttgttggcaaaattataaaaatacccccaaacgagcaaataaaccaaaacctagatgttgcacataatttaaattggaagacattttcatttgtaaagcatgaccctgacttcttttgtgtcataggcatatcttaggaaagcttattcttcaatttggtttcaaatctcttttagatggatgatactatgtttgaacttggtgaagcgaatctaaatattctttttattgcttttcctttaaaaaaaaagtttaccaaagcaccacatgatagagacagtgtcctaggtccagctccaaacagctcttattcattctcttatgaccctaagaagcacccattcattttcattgccatattaacctgatttggaggaatataataattttggttccattgccctttacctgcaatggtgtggtaagatttaaggaatgcaataattgataaataagtagagaattcatgagttgtttgtgaagtgctttgagttcctgtgggttatgtaaataattaaggcactgtattttctataataaattatctcaggattcatatcttatttcacaggatatcactgcatttcactctttcaggctaaaaaaaatgtacgtctactggtctttaagtaatggggtaatcgatcgtcgctcatgaggaaagttctctggttgtatctttgccccatctgcatctcaaagatggcacttctcggaacttagcagagtgatccccagaggggaaaaaaggtgcaggaatagattgtcataagattataacacctatcccccatgatggcagaataaggtcaatagtgtcttacccgaaggtcttcttacctctaacagctctctttcaatctctcaattattggtggaaattgagattgcaatgggtggaaaattcatcctttttggtttaggttgtagtttcaactgcatcttctactgaaacttttgtcattaagtaggtattggggtgggtatacctcacactctgtgctagttctggaccttctactaagtagttataagaccatagaaaagttgcttaaataattttatgataaactataatagtagtggttaaggacctggtctttaaagccagactctctgagtttgtatcctagatcttttacttcttaactgtctggccttattcaagttaaaaaacctctctgtgcctcattttccttatttataaaatgcagatcataatggtacttatcttagagggtcgctgtgaggttaaataaggtgatagatgtaaattacagtgcctggcatagagtaaacagtcaatagctgctagctgttattatttctggacttgttttcttatatgaaatagagaggcttataccagatggtccctaaagacaaagccaattccaagactctgattttatgctgaaaagagacaaaaattgctgaatttaagatttgctttctttttttccttgcattttttttttttttttttttttttttgtcaagagtctcactctatctcccaggttggagtgcagtggcgtgatctcggcccactgaaacctctatccctgggttcaagcgattctcctgcctcagcctcctgagtagctgggattccaggcattcaccagctaaattttgtgttttactagagacgaggtttcgccctgttggccaggctggtctcaaactcctgatctcaagtgatccgcctgcctcggcctcccagtgctggtttacagccgtaagccaccatgcctggccctgtttcccttgctattctcttaaagtgagaattagctatatctggccaaaagtctgggacagattggaagaagagggggaaaagagaatgggtaagaacagaggaaaagtttttaagctactttaaaaacttttaaactacaaactggacaacaaccgcttgaaaagctagaattgcatattaaggatggtgttttcttagcgtcagcaactggaggcattgtgtaatcatagttaaaaacatttcattttctctctgaagatacataagcctatccattcaacttgcaaagttccaaagcaggaaaagtagcacaagtgagtttagggcaacctgaccttttctttttctttctttttttaaattatactttaagttctggaacacgtgtgtggaacgtgcaggtttgttacataggtatacacatgccatggtggtttgctctacccatcaacccgtcatctacattaggtgtttctcttaatgctctccgtccccttgtcccccaccccctgacaggccccagtgtgtgatgttcccctccctgtgtccatgtgctctcattgtccaactcccatttatgagtgagaacatgcggtgtttgattttctgttcctgtgttaatttgccgagagtgatggtttccagcttcatccatgtccctgcaaagaacatgaactcatcctttttatggctccatagtattccatggtgtatatgtgccacattttctttatgcagtctatcattgatgggcattttggttggttccaagtctttgctattgtgaatagtgctgcaataaacatatgtgtgcatgtgtctttatagtagaatgatttataatcctttgtgtatatacgcagtgatgggattgctgggtcaaatggtatttctggttctagattcttgaggaattgccacactgtcttccacaatggttgaataatttgcactgtcaccaacagtgtaaaagaattcctatttctccatatcctctccagcatctgttgtttcctgactttttaaggatcgccattctaactggtgagagatgctatctcattgtggttttgatttgcatttctctaatgaccagtgatgatgagctttttttcatatatgtttgttggccacataaatgtcttcttttgagaagtgtctgttcatatccttcacccactgtttgatagaagacaacctgaccttttcttgcccttctagtacattccttatttaggaaaaatgttatctttgtcataaggacagccttgattcatagtagatttattcttcattatttttatagctttcttgaaatatatttctaacaccatgaaattcacccatttaaatgatatacagttaggtggcttttagtgtattgacaaagttgtgaacccattatcacaatctaattttagaacatttttatcagcctccttgccccctaaaaaaacccagtactttttaccaatcagtccatatttcccccttcacctagtccctggtaaccactaacctacttgctgtctttgtggtttttgcctattctggacatttcacataaattgaatcataaaatatttgatgttttttgactcatttcttctgtttagcacgttttcgagggtcatccatactgtagcatctatcagtacttcatttttctttatggccaaatactattccgctgtatggatataccacattttgcttattcattattcagttgctacagtaacttaaggaatggacttcagttactgttcacttaggttatttccatttttgactattatgaataatactgctatgaacatttgcttacaggtttttatgtatgaatatatgttttcatttctctggataaggagtggagttgctggctcgtgataactctatgtttagattttgagaaaatgccaaacggttttacagagtggctgcagtaggcacattttttaaaaacagctttattgaggtctatttgatatacaaaaatctgtacattgtatatatatatatatatatatatatatatatatatatatatatgcttttttttttttttttaagatggtgtgtcccaggcaggagtgcagtagtgcgatcttggctcaccacaatctctgcttcccaggttcaagcgattctcctgcctcagcctcctgagtagctgggattacaggcatgggctaccacacccagctgatttttgtattgttagtagagatgggatttcaccatgttgaccaggctggtctcgaactcctgacctcaagtgatccaccggccttggtctcccaaagtgctggagttacaggtgtgaggcaccgcgcccagcctgagctaccacgcccagcctggtgtattcttaagtcatagtgtaaatggcactaagttttgtcttcagcactctcagcttttcattcttttcaatctctttctccattcaatgatgtctcctctctatgtttaggactctactgtgtttattgtcatgtttggtcaatacactaagaaaaaaagtttttgataaatttatttgacttgaagtatgcatgatcaggatttatgtgaaatctctgttagaactatttgcattttaaagaggaaaaaaagtaagacaaaggaatgattctccaatgttggaatttcagatgtcaggttcctggagaggaaggcacttttgaaaaagattggagaattttctgaatagtaatctagtgtgacagagggagcatggactttgagtgaaaccatcctagcttgtgttaacattagtgagctattggatttaacagagcttcagtgttctcatttctgtggtgaagataataatatgtatgatgtaggatggtgggctaaaaaagacactgatgtaaagcacatagttcaatgagtatgctcaactagtggccactactgttatttttctgaaaccacatgacagagtgttgaccacctttctcatcagtttggccttgtcggttcaggttgagttttctactacctctgtccgggagttttagaggttcactaacatgcttcctgaccctgcttttatgttaaatggttgtcagtgtgagagaaataaaagtctcgggcaaaacgcagcaaaaggcatctccacactttcacacccccctcccctacttctagagttctgtggagagaatctcacagaacagtgcttttcagtgaacacctgtaattttaaatttaatgatttacattttctagtagcctcatttttaaaaagtaagaagaagcaggtgaaataaattttaatacttcttatttaacccaaatatatctaaaaatctttcaacatgtaatcaatataaaaattattgagatattttgcattctttttttgtgctaaggccttgaaatggtaatgttaaatttaatgatttaaattttttagtagccccatttaaaaaaagtaaaaagaaacaagtgaaatgaattttaataatacatcttatttaacttaaatacattgaaaatatttcaatatgtaatcaacataaaaattaatgagatattttacattctttttttgtgtgtctatgctgaggctttgaaatccattgtgtattttacatttacagcacatcttttttttttttttttttttttttaaagacagtgtctctctctgtcatccaggctggagtgcagtggcgtgatctcggctcactgcaacctctgcctcccgggttcaagggattctcctgcctcagcctcccaagtagctgggattacaggcgcctgccactacacaccctgctaatttttagtagagatggggtttcaccatgtcggccaggctgatcttgaactcctgacctcaggtgatccacccaccttggcttcccaaagtgttgggattacaggcgtgagccaccgtgcccagcatttatagcatatcttgattttgccttgccatacttcaagtgctcaatagctacacatgagtagtatctaccatatgggacagcacagccatagaatagttgttctggcataactccgttttgttccttttttggcatagtttttacattctgaggaagatacatggttgttccccactcaaacttgagctggtagttctgtagcaattgaaattgttgcctgatgaatagccgtgttccagattaaagcatatttgagacatctttttctggaagagaacgtccaccttacactattgaggtcactgctggaagccgggatggggtggttcccccacctccttctctgtgttttttgcttctttctttccatagctcttcattttaggttctttctttctccttaacaaaatcttaagtgttccctagaatagactgagtgggccgaagcagttccttgttttctttagctgtaatgcaatggaacaagtacagagcactccatggtatgacaggagtttgctggaccctctgcagcctcacactgactacctctgtggtagcatattattttgagaacgccatttaacctcttagtctcaggtttccacatccatggaatgggtgactctagagagcctctgatctgactccatattccatgggttgtgagccccaacatgatccctgccaaagcttagattcctaggacactaggcaggtggaacatttataaaagaaaattctttttcattgttatggcagctctaatttctcctatgaatccttatatctttcctagatggtcatgtaaaactggttatggtggtgttaacgttaccctccatcaatcaagttgaattgcagaaggcaaactgagagggaaaaaaatagtggaattaaaaaaatttttattgctgggtgtggtggctcacacctataatcccagcactttgggaggccgagatgggcggatcacctgaggtcaggagttcgagaccagcctggccaacatggcgaaatgccgtctctactaaaaatacaaaaattagctgggtgtggtggtgggcacctgtaaccccaactacttgggaggctgaggcaggagaatttcttgaacccgggaggtggaggttgcagtgagccgagattgcgcctttacactccagcctgggcaacagagtgagactaaaaaaaaaaaaaattattgaagcattcaggatcccatttataaggccagttggaggccaatcccagtttaatccaccttgcggactttgtgatggaatgcatatgttgttttcatgctatgtatttgcagctattggattttagactggaaacttgtcttggaatagatttctgattgcagtattgcaagtgcagaataccttcttgagttcatatggtagagcccaggaatttaggaaaggagtctggccctcaccttggaatggtggagttacttgttcaacgtttgcctcagctgaaatactgaaataatttctgtttcccacctgtcagtggggcgtttgcaaacttacagtgaggatatttagaaagatgtttgagtttccctaagaaagtgtggtcagtaagtatgagaaaaagtttatatatttgtcttgctttgagacaggttgaatctgccagtaggtcagaggaatacatttacctagtagcctgtgctggtagggcagagagagtcagtcgtttttcctgagggcgttaggtgatttgagacctcaagtgttgtcactgtaagagaatcctccttataattaccattgttaatagaattgaaactttgcatttgtcttttatccctaacaaagaaagactcccagagagtctaatgatgagccctgcctacatccattctgaaaggcactctatggatatgagggtgtagacgttaattcctttctgtagaatttgcatgcagaggctctagggccaatgcaccctgcttacattaataaatatttaaaaacaaagagcgggtaacacaagcacatctttcctttgtgcatcctccttactagggtgcctgtaatacctaacatcttgggaaggaaatgtctgggtgggtgcgggtgggtggtgatgctgcgcgcagcaccaagtataaaggcccaagaagtaaccacatcgtgtgaggaataaattaaagcagcttcatccggaggccaattaaggaagaatgggaaaaaagaaaaaacaaaacccagcaacaataaaacccaagagatgagagagcatgttcgttcagaccacgtagaaaagagaaattgaagtcgtctggaaggagtttaaggggatgcatcacaaaataaaacttttggaaccaagaaacagtggagaagcccggtggcgagccacatggccttgtgctaagacgagatgcccttttcagaaaggataatgatgatgctgggagctggaccgtcgtagattgtcgcctgagtcttgctgtaagacgctgcacaattagattagaggagagggctaggggtggccgcgaaccccctcgcaaatctgttgacttcaccgcagggctgatgcgcgcagcatagaggacgcttgggagcgcccggccactgcccggtccgccggcgcggcgccgcgtcgcacccggtcttctctgcaccctgcgccttgcaccggctccctctcccgttcgggcgtgcggcccccctcagactctgcccttgagttcccagcgcaggccgcacgtcaccggccgccagcgcgcggaccgcgaagccaagtgtcccccaagcggggcttgctgtgttttcatcatttcccttgcctggcccgggttgcagtggtcagccgcagcggtctgctcccggcggcggcccgaggctcccccgccacctcttctgtcccggctgacttaactcttctcccaaagggtggtaaagagagggccgccgccccccagggggaagacatcctcttgggagccatacttcctttattaaacacctctcaatgtgggcttggagtcacattcagagcctctgaggcagaggggtgcctgcggtctgttcccagggagccgggcctagggtctgttcctgggaaggatctgttccgtggggcccgctggagccgcgttttcaatatgcaaagtgccggtgctgtgcagacctcggtggtggtggttttgcatgcagaagtgaaattcagaaggccgcgtgtgagcacgtgggtgagtgtgtgtatgtgctaacacgcacgcgtattaatttgcagctccttagttggccgtgtgttgtctcagctgtattcgataaatattcgagttgttgctttatggtaatgaaatgaattaaataatataatctggagttactgcagaaaccctcccgtcttttctgtctctcagctcttacagggagtgcgtcatcttcccctagggagatttttaacccaaagaaccttgatgtactttaaacagcactgacatttgttttccttaagctcagtctgatttctttaacacttgaagaaggtttggggccttcagacatagctagtttcttatatggcggcttgtcttgtctcagaggaatgtttaaaggggcttcaagctgccttatttttaccagtcttcagaaaatagagaattgattttggtagtttgccccctcctgcccatgcacgcatagttgcctcccttcccccacctagcctgctggagcccaggcaggaaggggctgtcatcatacacatgcctaagccatattactttatttttcttcttagaaagttacactaggaaagatgttcttgatgtgtgattattattcttaagtgtattctagtgcttgcttattattgctctgttacagcttcacaggaaaccagcaggtcctgcagtagacggtccagaaactttctattgaatgaatgtgggagagctagaagtcaggaaggttgaattccctcattacttcgaaaatctataaattaattccctctataaatttccaccagcctagtctctgatccaccagctggagaatcaagcccattattaatttcacaggatgaatttctcatcctagtaactctgggggagaggacgaaagggttattatgtaggttgagagttctcttgttgcttctgactgttacagatgttgcagctaaaatataagcatagcaataataatatcagcaatggtgatagtaaagaatggaaataactgcttccttctgctcctgatttggacacccccatcctcctactcatttattctattgactcctctctaggtgtttcaagtagagatgttttggtgacttcctaggggagagaagcatctctccagtggcttccatttgggtataagtatgcaaagattgtttgtgttgtcaagatcccactggagtatatcttcttacctataatgtcacctcctgcatgttgccctttgtaagtagaggttatggaagctcaattattttttaagtaagtttcataaaatatttttgaatgccctatgttctggagatgttggtgaaaactctttatcttccacaggttgtatagtgaaaaagttaaaaatgaatctctatcctggttggatttattttttcatttgagaaataccgttcaacatttttgttttagacctcctggagggcatgatgggactgaagagtctttattccattttggtctaattattgctttagcaaatatttgtgaaacttctcccatgcctgaagtgttgtgacagagactgaaaaatacagatatgtgtgagttgtggcccttaccctcaaggagcttccaggggcctgaatcatgggcagaatcaatgtgacatgggcaggtccatcactcccaaagcccatgacaggagcctggaatgtgttccccagagccaggagtgtggctgtaaaggtcattcttgaccaaagttcattgctgccctggtgatacatgcagaagcatgctttctttgaatcaaggagttctagtttttttacctggatgcctcagaaatgttctatgtttgagtccttgcatactgggccttcctgcctttcctcaagcactgtaacctcctttatttcctttctgcctttcccctttcactctcttttgttctcttcctcccctctactggggcctacccacccctccacgccctccccgcccccattgctatttgccaaacttgtgacctgagaccacttggcatttccgtgggatggctgaaatttaccacccgctgaataggcattctgtgacatttgctcacctgggcagcttaagctacatggtctgcttctgccttgaaggagtactgagaggaagtgtgaaatttacctctgtgctccagggttcttgctagcagggagacaaacagcaatgctttctagaagctggaattaatttttatcatagtgcacatatatgtttataccctacatttattatatattcaataagtacatgtagacaatttgtgcattgtcttccatttttttaacaaattaaattttcatgcttagcgtcatctttcactttcataccctccccttctctccctccctgctagtagaacatactgggttaacttaatgctctttgaggccttgtgtcattagaccacctgtctccttaaggtttgtgatattccgtgtgatgtctttctcactgtggcctgcccagtcctgctggtaaggaaatagctgcctgtctctttggatcaaactggtctaggagcttgttcagcccagttactggggcagaccagccctggaggcgtctctgactcttggaacacacagacagcacagtctgtctgtcctggctgtcagtcgaagaagggaaacatgcaatatagatggttaagctgttactttatacttgtgtgctccaagtgatttgaaggaaagagtgctctgggccccagtagtggtggatcatcctggaatgaaactgaacagagaatgtcggcagaagtgatgtttcatactttcctgtatgaaacaggagcccagaattctcctgttcatatgtaataggagttaatgcatatttaaaaaatgtgttaggtacagcgctattattactctgatttttaagatgaggaaactgaggcatagagagtttagtgaatcttcctaaagtcacatagctaatgagagagaggctgacttggagattttacttggtaagttttactaagtgtagatttttctatgaaaatattcattcccattgagtgacagcccatcaaattgtgattcttccaaggaaatccagtggaatcttacttggttgtccaaataacaaattgtctggctctactcatttctgatcctgtttctcaggtacagaaatttaattatctcatgactgtggctggctgcaaaacaagtaaagaggataagttcaaaactcgccttgagcttatttcctgattttcattaggcctctgcctattctgtttttagaatccacctgactttttttattttttgagatggaatctcactctgttgctcaggctggagtgcagtggcatgatcttggctcactgcaacctccgcctcccgggttcaagcaattcttgtgccttagcctcccgagtagctgggattacaggcgtgcgccaccatgcccggctaatttttgtatttttagtagagacagaggtttcaccatgttggccaggctggtcttgaactcctgacctcaagtgatccacctgcctcggcctcccacagtgctgggattacaggcgttgagccaccattcccagccaagtttgttttttgagatggagttttgctctggttgcccaggctagagtgcaatgatgcaatcttggcttactgcaacctctgtctcctgggttcaagcgattctcctgcctcagcctcccgagtagctgggattacaggagcacgccaacacacttggctaatttttttgtgtttttagtagagacggggtttcaccatgttggccaggctggcctggaactcctgacctcaggtgatccaccctcctcgacctcccagagtgctgggattataggtatgagccaccgcacctggctctagaatccacctgacttctttcaggtaacaagcatgacttatttttgcagggggtctaaagcttgaccaccgctgttgtatatgtcacctttcctagttccttctcagaagtccagcattttgacagaagcataaagcagggcacagggtcctgcctttgcacacccttcctgtgcccattgtcctatcacaccacctccctggtgcagccagactctaggccctgggccctccagtgattctacgtggtgcggatggatgcttccatggtgagacccaaaagtctcatctgtccagttacagagcctctgtttttggaaaggcatatccagcagctccccgaccgccatttttttttttttttttgagatggagtctcactctgtcacccaggctgtagtgcagtggcgcaatctcggctcactgcaacctccgcctctcgggttcaagtgattcttctgtctcagcctcccgagtagctgggattacaggcacgggccaccgcgcctggctaatttttgtatttttagtaaagacgggatttcaccatattggccaggctggtctcaaactcctgaccttgtgatccgcctgcctcggcctcccaaagtggtgggattacaggcatgagccaccgcacccagcccccttttgtgattagtgggtgttttcagttttgaggagggaagatctaccttccaaattgcagtggtggcccagagaacagcctggtatgcaggaccagggtgaaggtgaagctgttcatatcaccccaggtctttgaaggggaagaaaaagttcaaggcatttcatgttaaaacttactgtttagaaaacaatactgttgatattaaaaatataataatagcatcattattaccaagaagaccttaataaagaaaattttacaaaagaaaatcataaatctactaatttacctttaatcatactatcctagttcaacgtctattttcagttttcttgtgtttacattttcttgtgttactttccttatggctgtgtaaattttccatgtcttggggatgattgtgtactcagggaacatatttatccacagaacctgttatgtatcttatttatttgtttattgcttatttcatttcaaaaaggcatgcaagaagcttaccaaaagatgtgagagataccaagagatttactaaataaatgaggaaattagaagaaaaaaattcaggtagggcaataaaataacatgcaagggaatgttagtatgtaaaatggtatccataagatcctttcttattgtgaacttctcaggccttttgctagtaaggaagtagctactgtctctttgggtcaaactagtctaggaccttgttcagtccatatcctagaaaggttggctacagatttgattctgtgcttcctagtagcaaaagcaaaaaagggaaataggatccgtttcaaattgccaaacatttagaattggaaactaatcagttatttaaggagaagcagatttttttcctggtactggaccccatgcaaaatttctttcataatttctttttttttttttttgagacggagtttcgctcttgttccccaggctggagtgcagtgacgcgatctcagctcactgcaacctctgcctcctgggttcaagcaattctcctgcctcagcctcccgagtagctgggattacaggcacatgccaccacacccagctaatttttgtatttttagtagagatggggtttcatcatattggtcaggttggtctggagctcctgacctcaggtgatctgcctgccttggccacccaaagtgctgggaattacaagtgtgagccaccgtgcccggcctcataatttctagtaagaagatgctagtgatatgataggcattgccctcaacgacatgataaaaaattatatttcatgttttaccatagccctttatgcataacccatccacagcactcatcagatgttatcataattattggtttactatgtaattctcttgttagactcagaatttcttgaaaatgatgaacaggatttgtatgctcagcccatagtacatattcagttaatatatttttgaattgaaacactgttttatctgcttattcaaaaggggaaaatttaatttattaacacttactgagtacttgctactctttactctgaaataaaaagagggatgaatcaaaagtccctgtccttgaggaaggtatgatttactgggaataaacatgtattaatagttatattgtactctagctggataattgctacatgatagaagtgtgaacattcttttgtgaaatgacttatagattgcttaaactacactctcattacagccagcttcaccttttagaatttggggtttggatctttaagccaagagaggcgggaaaaaaaaaaaaagaataatagggcatgtgagagttttctgagaggagagaggctattgtcttgtagatttggttttttgcttccattcttttttagggaagagggttccattcctgggctaactaacccagcctctctgaatctcaggtcacagggtgagaggggagtggggcccctcttttagtctactcctgacttgacctggcagccttagctgggagacactgttccatttttcatgggcagctggagttgtggccaccattgtgattcttgtgactggcttacagaagaaacatggttcctaagaaggccaggagggacagtccctgagacatacgtgtaaaatgaagagtataaaaagcaaataactaccacaactggttttatccagggctgttaatttttagatactcattgctacacttattagaaataatgtttaccttatttccttttcttcctcctttctcctcttccttctttctatttaaaaaccatttgccaggtacttctatggcaggcagagtgagaaatataagataggaacttgtcctcaaattgcttacctctgggagaaaacgaaggcgctttagggcagctcttgatcaggcccttgaagataacttaagtatagcatagcacttaacccacaatatgttctcaaagaaagtcctgaaagatgaatccagttttctccaagattgcaagctcccccttgaagatggtaaggtcctagtgagccatgctttattcatctttgcatgtctagaccagtgcctggtatatatatttgatgcccaacaaatgctagttgaaggaaggaagggagggagaggggaaggaggaaaggaatcacaaataattcacctaaatctactttggatttacttatatttttagagtgaatatcttaagaaattatttccaaaagccaagtgcagtacggtgcatacctataaatcccagctactagggaggttgaggtgggaggatcacttgagcacaggagttctagtccggcctggacagcatagtcagactcagtctctaggaaggagggagggagagagagagaaagagagagagagagagagagatctaaaagtagtattgtctgcttgaaggatactagtttgttcatcttatgtatgctcttatgtgatgtgtcgagaattagaagacaggatggaaaagcctcttagatctcttagatctattggatcactccagttaagtgctcagagagaaaggtttctggtttggatcagcatgttactgaatggggagaagttcttgaatagctctctgttttctgagttaagattttgtgttttggtgtgtgaagagtaagaggggtatcatggagtagatgggggtgaggtagaatgggaggtgtgcaagagaggacacctgaggaccgtgtgaaggcaagtgataatcagactaggaagctggctggacacaaccttccagtgggagaggcggaggtgagggggcagctgcttctttaactaatcaagggctcaggttccagtaccttccttttatccccatccacagtttggcctgtctcttctcatctgcaaaatctcctcttttctttttccccctcttttaaaagctaaactaattttctgtctgttcatgttgaccttttgtccagttttcctcccatcagatgaaccaaaatactagaaaaggactcttccatctactactactgctagtaataataatagtaataaaataaataaaaccaggaagctaaaaatggaaattaactaattaatttgacatcaatgaaagaggttgtagaactggaggcaagggaaagaatggaatggacatctttctgggcacactcctcactccttccccaaccccttccaatgtgagtatgtgtaatttaaacctcttcctggggaagagtgaaagaagaattttacccacctttttccattcccctcctcccttagtgaaaattcctagtcatggtctgtgatatctcaaacttggctgtcactttttggggtcattccctggggatacccttcccccaatcccagggcagttctaatgtttctgagtaaggagtagtgagaaactcagttttccctgcaaacttccctcctcatcagccccactcagtgttgagtttagcatttgctttagtggctttgctatttatagacttgtctggggaggttggggttgggggacagtgtcaggcaaggaatctcactgtagtctttgaggggggtagtcaggcattgagaaccagtgcatttaaataaaaatgtcctgaacatttcttttggcttggtttagagaccactagaaccagttcctttctctgattcttttctgtggttgcttcactttcttgctcagtagaaccacaatctattaagatttcttatttatgttcttcttagttgccaaggctgccatcctgacttgggcatcttggcagctaataacaatgtatgtctagctgagaagcttttagcattttgggttgtaaactttttctttacatccaatgttcatgggaagtcctttcttaaacaagaacccccttcctttctgtaattaatgaaataaatgtcaatatatagtttcacctcttctgtataacatcctttgaataagtagtgcttatgacattcattcattcattcattcattcagatattcaacaaatggctttttccaggagtacttagtaaaaaagagagaagaacaactggggaacctggcagtacaactttgatattcacagataggtgctgtactacacacatgttgaaagaactgtaaatgtaggtgattgctctcatagtcctatgggcacacacatcttatgtttaggggtttacattggtggactgacttattgctgtaatgtgttcagacaaataggaataagaagagcaaaggggtgtgtactatctgcagaagacacatgtgcatgtatttcattgctgtgctagaggaagctgctcatggtaaacgtgctgaagttatccctgttgcaagaacaagcatcaaacacaggactgggcacgtgatgaatgttcaataaatgcatgctttccccttttcatttccaaggtggaatggaaacatctgagcccatgtggagcagcattatgatgcaagggaacaattactggactgttctatgttgagttgataggtaatgagggggcacctcactcagaacaatttcttatctgtaatgggggcactagttacactcattatccaggccctgtccacttccagggaggttgtgaatctctagtgagatgggcgtaaaatgctttgtaaattataaagcaccatgtaactaagatttctttgttaacctatactgtcacaattgcttataaaatcaaagcaagagaaagaagtcacagattggcaggcatgtggagggctgatttagaacatggcatagatttagaaatcctgttgaacacagaattcgtggggcatgcagtgaatatggagctggagatctcaagggagttgaacagagaggtgtgattgagagtcagatgatggtgagtcgagaccattatccgcagagggaacttgaaaatagaggttatctgcccacagagagaacagtggcaacagtccaccaggattttatatggagaatgagatttgaatgtcgacctcacacccaatttcagcagcagctctgcgttgtaaggatgtcatgcataacgaggtataccagcgaaatagcaagcccatgcttgacattgagcagcatagggtgttgtttgtgtgtgtgtgtccctgtttctcattcccggttttacataactgggatgtaggatgctacaactactgctgtatcttcaggtaagatgtactgctatctttcacttttatgtagatgtgttcctaaaaagtgtatgggtgtgattttggtaatccttatcctaaacttaagtccattccttagtttcatggaagcaatgtatatgacagaaggaacaccagaggggagtgttgtggagagtgttgtggtgacttggtaagttgcttacacattgggggtcttggctgtctcatctctaagtgaaggggttagatatgaatgattaataagatccctttcaggtctatgcttctagcactcccttttgtcgggtgaggagccctttttgtattgtgtatactcacccagcactttatctgcctctttgttgttagctgatgatctttgtgtgtctgatttttttttttaagagtaaggatgtcatgcactcttattcaaagtgtagagtttattctcccattcataggaatgcaaaatgagaagttttaaatacacggattcacttcctaacccagtttctcagaagattaatgaatagtcatcctgttgacccatctgcttctcttcttcacatcgttttgtgcggatgaggcacacacagacacagagttctcacttgcagcagtccggcacatacagcctcacacgcgccacaccagggggtgtccccaggagaggtagaacaggtgccagatgttgcagcagtacactcctccctgatcctccttctcatcccccaccccttttctgaatctcctgcacagtcactgaagtcccatttttatatgcaagaagagaagagaaagagccctaggatgcaaggatgccttgtcacctctcatcttctgtgctgggatagacacctgatctttttggaagtgaaatccagagtctggggcaaagaccaaaggacagaggccaaaccaaaagtgactgcatggttgcatgcgggccccaaatgattgaatgaagcaaggatacccatcgcagggagctgaaaaacctcacatccagatgcggtcagagaggttcacagaatgaaaggcagtctgatgagtgagtgagatacacccgcctgtagagcacaatagaaaaatcaatagtaaggggaggtgaaagagtttcagctgggttttattgagcacaaagaagacaaactggcttttgctgtgacttcaactgtatgttaatagtgctttttaaaaactacagtacaggatttggggaaaaaaaatcacacggtaaaagttgccagccagtatatgtaagtgcacacacacacagagatgaggaaaaagagaaaagagaaatacactccggactaagctttttttttttttttttttttttttttagtttcgaagcatatggtgaagtgtgctataattttatatgcatatatattctttattctggacttccagaaagcaatgagtttcatctgtttttttccccacctctggttccttcttcctttcccttgctctctacaagtctgctgtggctttattaggaattccctttggtttagggggaaaaaaaataagagggagagagagagaggctggagggggaagaaacaaaactagctcttggctggccgcccacagcatgggcccaacagccttgtttgagcgcgttgccccggccttctgttttcttaagctcagccccctttatccctccgcccccaccatgccctccttttcctaactgggctgagggaggctgtttctaccctcctaaccctcttttttcctttctgttgtttaaagagaatctttctctcttttttgaggctccagcggcgagaacagcagcggatttctccttgccggcctctcccctcctccccagccccctccccgatgaagggttcatccaaagttcgaatccagactctgaacaaagtggcgcagaccttttcctgactcctcaccctttgtcctcatcactcagtgacagacaggaatcaaatgctgaggacccaggcgggagaggggcagtgggggagggaggggagaggagaaaagttcccattaactcgccgggcccttaacaaccactggaaggaggaggggggcgcggctgagaaaggatttttgtttaagtttctgcaggcacacacacagcattcccaagttgtttgcagatggtttcatctggtttctgtttgaggggaagagagtatgggatgatcagtaaggagagggggcggggagagggaagagtcttctcttgaccagaaaatgatacctgtggtgtcttttcctgaaactgaaaacattaaagcgttctgatcccagagaaaacaaattctctgggatataagggttcaccttttggaggtggattacacttttcaggacaccagagaaccatagagcaaattacttcttccagagtgctaaatgatcccctggtgccctggaaagagaccgtttacctccaaaaggtgagttgtttattgccagagagtagaatattggctgtaatgcctgctcatccatccttctccatccctgcgaggtatttagggtggaggagatattatccacctgtcaccatggggaaggagactgacaaatacttttctgattcctgttcctaagattgaattgctggggaggaaggtgaagtgacttttccaaggtcttatagtgatccagtgattgaagttgaattagatttctgttcctgttgtggtgctcttgtttgtcagagaaaaataaatatcttaatgctcacacggagcctcccgtaaaaaggctgataagaaaggccaggtgcggtggctcatgtctttcatcccaacattttgggaggctgaggtgagacatggcttgagcctaggatttcaagaccagcctgggcaacatagtgagatcctgtttctacaaatagtaataataataagacatccaggtgtggtggcacatgcctctagtcccagctactcgggaggctgaggtgggaagattgctgagcctgggaggtcaaggctgcagtgagccgtgatcgtgctgctgtgctccagcctgggcaacagagcgagaccctgtgttgaaaaaaaaaaaagctgggggtcagggagcagatagaagaaataccttggccagcgcaactggaaagggaggagccaaaaggggaacactttcttgattgtcccagcctcattaggagctaccacagggctctcctgcatgctccttgttttctttgtgctctggacttgctcacttgcactgcttgcttcttcccaatcgccgccgcccccctgtgcttcaggtaaacaagctgctctgtgggaagtgaataatggggcctaaactgacgaggaggaagttaagttgagaggtgccgtttttggtgagccttaatgaggaggacaacagtgtgaaatcttacttggcattgtgaccaggagatctattgccttttcctcccctaaatcttcagaatcatagtggactatatatgactcccaaaagtgtatgcttttacctagcccttggaagcttggatggttagagcaattgggagtttagtctgttggggtaaacagggcattgatctaaggatttgttaaactgtaaaccaaataaagagcaaagtctgctctacagggatgttgaagattcaggatattaaaaaaaaaatctctgactgcatgattacccttccagacatttattgaggtttttgtttgtttgtttgagacaagatcttactctgtcacccaggctggagggcagtggtgcgatctcggctcactgcaacctccgcttcctgggctcaagtgattctccttcttcagcctcgtgagtagctgggactacaggcgtgtgccaccacacttggctaatttttttttttttttttttgagatggagtcttgctctgttgccaggctggagtgcagtgacatgatcttggctcactgcatcctctgcctcccaggttcaagcgattctcctgcctcagcctcccaagtagctgggactacaggcatgtgtcaccatgcccagctaatttttgtatttttcgtagagacggggtttcaccatgttggccaggatggtctggaactcctggcctcaagtgatctgcctgcctcagcttcccaaagtgctgggattacaggcgtcagccaccgctcctggcccccagttaaatatttctggaaaagagttctgttcacaaaaaattttggaatcaagggaaaaccttattaattaagatctttgataatgtggattctaaataatttcgggctaagttgaatgaaaacttaccttttcacccatgaaaaaaggagctctgtaactatattagtagcacaaacgggttcatgtgaatgtttaccctgcttaagagagtaaacttttcagagttagcagcagcatttgcatacaataaatgttctaattactaatgatccttgccaattaattaaaagtatgtctgtcatggcgctgctttcttggcagtgcttttattgatgatgagcttgtgtgcatattaaataatacagtgacatttctttttaatgtttcctaacccaggctttgtatggcagaacattctgttagcagacttgtgcaggttttcctatcctacaagtagagaaatggagagatccatgccctaccctgagcctgagagtaacttggtgatagtgtctgcattctaacccagtgctcctgtatttccttggattcttgtttcttgtgagcctgtaaaggcatttgcaaagttggggccttctgtgaacaggggtgctgtggcactgcagttcattgcagtctagactttccacctcccctgtggcacttttggcaagttgacaggtataattgatgagttattctaagaatgtgattcctgagtaactctagagtggagtgactgtgtttctgagtagttaatgtggctggggggaaaggcagatgaaggggatgggggttgggaagctggagggaggtggggaggagggcctttgttcaaatcaagttgtgttcaagtctgtggttttaagagagagcaacagcgattctttcctagcatatgaaatcttcacagggctcatagtttgagtgtgagagtctggatgaggttcatcccagtatatgtcctaggaaaggaaatagaaacacttagctttgacgtgtaaacctccatgccaaccattttggttgagtttaagggaaatcacaaagcagcttctattgctgcaaatttgcctagtagcccaactttccaaagttaagatcatccctggcaggcctttaattctcaagggtctgcaaagttgatggtctgttgagaaaggaaaggagaagttgaggccacagttgtgattaccatttctccttgtcattgagaagcagcagtgtctgagcagagtctgagggtgctggccctggccacagaggctttggggcagagtctagcctggaccagggggagtgaaagggaatggccttgttggaattggcatggcatctccacacagtaagttgaaaagcagtacaggatctacgaccacatgtggccagccaggtgtcagggcttattgctcctcaggctttgaattctgtatccccaaccatccctcctgagtagagtctctgctgcttcctggacacaccaggctcccacgcgctggccttgctgaggataaagactgcccctgggttttctgtcgtgagcactcacctgtgacaggctgctctctctccttccccacaatgggaacttgggagctagtactttcccagcatttgtatgtagcacacaatccttagattttttttttttttttaatttgagacagagtcttgctctgtagcccaggctggagtgcagtgccgtgatcttggctcactgcaacctctgtctcctgggttcaagggattctcatgcctcagcctcccaagtaactggcattacaggtgtgtgccaccacacccagctaatttttgtatttttaatagagatggggtttcgccatgttgcccagactggtcctgaactcctgggctcaagtgatctgcctgcctcggccttgcaaagtgcgggaataacaggcatgagccaccacgcctggccaacccttagattcttttttaacccaacttatctctttataattccagacatcattttgttggattttgactcctggtgggttgctgtagtagcacttttatttttcaaatgttaggtggaccccaggtgccaaggttacttccaaagaattaatctatgcccccaaaaggttagaaatactgtgtctgctcccatactgtctcaccttttacctgatgagaaaaataatcagagagtcctggttgtaaaccccagcttcagtggttaccagtggcacaacccagggcaagttacttctgtaagcctctgttttgttttcatctataaaaatgtgggtatttggtttacctctaaaggttgtggcggcggggtgggggctggaaaaataataaatagccagaattttgcaaaaatattgctaagttttttcttccttttttagttttcactgggttgaaaacacaccatgtacttcctttaaaatataaagtgccttgtgcttggggaccaaggtgcttttcacacataatgcaggcacttattgttattatctccgtttcttccgtggctctgcatgactgttctgagaatctcttgctctcgagagattgagctcctgattctctcagagttcattcatgcctgtaagcttggaaactttaaggtgaggctgatattttcttcctttgggagaagcttcacttttcccactttagccttctttcacctgtcataccaggttgctgtttcttggtagaacctcctgggaattaatagcatagtgtgattattataataacttaatttctatagcactttattaatttcatgtcactttcctatttcatctcacatcaaaggtggcattatccccattttagagataaggacgttgagcctctataaagacatgatttaaattctccttctaacttgctgtaggaagatcacgcagaagcacaagatgaaacacagaatgctaaagctgcaacagagacttgggagatcatttagtacagcactgagaaaaagagagatacttttctttttttttgagacggagtcttgcttttgtcgaccaggctcgagtgcaatggcatgatctcggctcactgcaacctctgcctcctgggttcaagcgattctcctgcctcagcttaccgagtagctgggattacaggcacctgccaaatttttgtatttttagtggagacggggtttcgccgtgttggccaggctggtctcgaactcctgacatggtgatcctcctgccttggcctcccaaagtgctgggattacaggcatgagccactgtgcccggccaaaatagagttactttaaatttaagtagaaaatttaaaatttttaattgccacattaagaaaagtttaaaaaaggtgaaattaattttaataaaatattttccagtatattcagaatactatttcaacatgtaatcaacataaaaatgttaatgagatattttataatctcttttgtcctaagtcttcactattttgcatgtattttaccaatttagaccagccacattaagtgctcagtagccacagtggctagtggcaaccttactagacagcacagatctactccaaatatttaattttatagatcaggacactgaggcccagaactgtgattaactaataagtggcagaaatgaaacacgtctccctccagagctcttttcattatactgtcttcactctactgctttgaacgtgaagacaaaagaacccggtttctgttcatacttttatatcctctcttatgcagtctatagcctgggcttggaacttagagccttaacagactttaagacagtaccacgtctgaacctagagttatattgtattctttctattagcagagagctttctgattcctaagaatttccttactctacaagaaatgggatttctgctttgcaaagttcccttcagtggaatgaagttattgttgcccagagcttccctggtacaactctatggacttgggcatgattctccctaaaaatccgtggaagccgtgatcagagcccttggaaaattgctctggtgagccaagtgggcagtggcagtagagcagttttcagtagtggtcccacggtggcaagttggctgtgaagcagttgaggatgacatgaatgatggctcttcaagctaagactgagtagttgtaatggaaaacaaggtcagtcacctggctagttgatgatggtgggagccttttttttttttttaaaggagaagaggagccatttattaatccccacttttggcatgattcatttgctcattgtcagcgcctagctcagctttgcttttagtaggtgattgccaaactgatatgatcgttgtatattcactggcttcaagaaaccaccagtgggaaatcttatttatggagatgatggttatggttatgattattgacagccattattataaacatcattattatttagtgttaatcaacaacaggatgaaaggtgctctaaagaacacagaattagaccctgtctttgcaaatgggctcataagaaaagaatgacagaaagagacacccagcctgggctagctaggaaaaatacgttttagggaaatacagctgacaaaatagctccaaaggttgtaatttttagggctttggtggagttcaatatggtactctgaacacagaaaaatggaaagtagaatttctcagtaaaagaaagtctgttgtttcagtccagttttactattagagtgagttgtaaagaacaagtaaaagggaaaaattggatatgtgtttttgttttgttttattgccctgcaggtcccctctttttttttttttcttggtttctcaattttgaactttaatgcattaatacatcaggtatcttttacaactaaagtagcccctgaaatattttctgtgcagaaaggttaccttcaagtgcattagggtctcacattgacatacaaattcaggtttgaatccttgcaaaatcacatggtaaaatcgggcctcatttcctacatggtaaatatgcactctccttgagatggtgcatgagctttctagttcatcatagtccctcccatgcaaacaccttactcattaacttttatatgcctgttccttacaaaggcatttttagtttcaacccatatatttagagcagtggttctaaccatgggtgatttgcccccaggggccatttggcaatatctggggacattactggtttgtcataatgcaagttcatttttatgtcatatttttactgtgtactttttgcattttcaaatgactttgactattgccagagtcattatagacctgcctatgatgtaggagtttattgtatctagtggaaaacatacctgtttgtggggcagaagcttctgttccattcatcctgattttagacacagcatttaacttttcaggttcagttccatatgtataaagtagggataatagtgacatcctagtgtattaagaattaaggtgttattatttctgtcactgttacttcaccctaattttgtttccacactcatctctgagcttttttacttcttatgttgttcagtgttttctaaattaaaaaaaaaaaaagaaattatccaggaggaactccagggtcagagaaatttagttccttggccaaggccacaccacaggtaagtggtacagcgtggatatgagactcagtctcctgaattggatcagttacttgcatgcaccctgtaccctctgtctttatttgggttggaaccctgggggttcagtgatcctgttccaggatctacacttagcttggacttcttgttggttttcttatgcttatttttgttttataaaatgctcaatggtgtaacatttcctttgaggaatcgttattcattaaaaagtctgaaaacagtgctttaaatcatgtctgcttctttttgtacaaccagttacctcacttcttcagccaggatgggtttatgtggcccctcagggccttctaagaagactatcttccctgtcttttgtggaaggaacagagttggttgttgtcccctagaagggtggtcatctcttctcctttgtaagtagatggtgacatcaagggttgacacttggaaaatataacatagttctatgacgacgtggaactatctagttttcttggaataatggtattgaaatggagctatttgggggtgcagagataattttctaccacactttgaaatttgttggccaaggatcaagaatttcccaaatctttatacagccttcagaggaccatgatattcatcttgttgttcccacctatgataattctaaagttattgccttgaagccaggacctggtatgtactttttctccatgaatttgtgaagtttctgctatattttaggacattacctttaagaatagactttttatggccttcgttttggggtctcgcagccatgttgtaaatataatacctcaggagagtttgtaggttataactctgggcctttaagatgccttggccttaaattttttatttaaaaattaaataaataattaatttaagagacttaaattaattattgctgtacatttctggagagttccccaattcctgggtttctggttctcctggtattttagtccatattctgttggtataacaataccacagactggggaattcacaaagaagtgtatttggcttgtggttctggagaatgggaagtcccagagcatggctctggcatttggtgagggccttcttggtaacatggtggagttcatcacatggtgagagggcaggagcaagagagccagactgcttgcttttataacaaagcaattcccacagtaacaaacccactcctaggatagcaatgttaatccatttgtatccattcgtgagggcagagggattcagtttccaacacatgaatttttgggagacatattcaaaccatagccagtttgtttgtttttatctggctactagagtaagaattctttttttcttttctctctttcccctttctccttcctttgttccctcccttcctagagggtggtagagaccagagctggaaaatttcagacaggagttaggtgtcgagaccaaggcacactgtggagggttaagtcattgtcttccattgtcttagggcttctttgtgtatctctccagtccaaaccttgtggatggatgactaccggcactcttagagataggagagacatcagttgagctgaactagtttaattcccagagttctctgaggaacatactagtgtttgttgattttctgttggattactggaactctcagtatgtggtaaattccttgaaaaacctgattgcatttgattttgtcattggttcttatcctttctgagcaacaagcaccaccctttccaatgacactctgccttttttattctttttaacttttagaagagctacctgggcagccaaatttttcataaagagccttacacctgaaatagcttgacattgtgtcatacctcggagcgtatagcatatttcatttatgtgattagatttgacctttaaaactacccggaggtaggaaggggagggatcattatcccacttttacataaaagaaaacagaggctcagttgccccaggttattcaacaggtgtgtggctgagcgttaatttgaatcctggtttgtccagctccagtctatgtcctgaccaaccccgccctgctgatagacatcacggtgtttctttacaccagatttattttctgtctcttttttcctcctgatttttttttttttttttgcaaagaagagtgtttctgccagtagctttatcagatgattttgcccctcttttcattctctcccaatagatctcatgtctaacactactctaactttgctcccctctgagaccagcatgaactccagttctttctaaattgtgtaattctttttttttaaaattaattaattattaattttaagttctgggatacatgatgtgcaggtataattctttcttaatagattctgagcttgaccttccagtcgtcttctactgctcagccacacccccctccatttttgtttcttttctctttcttcgggcaaatctgcaattgtgggcgcatatttaccttgttattttttacagtattcccatgtgaacattttgccagcggcctcttcttaattttagtcctttctggggaagggttaatagttcaaacccattgtttttcttttgagggttgagacttgttataaaagctgcctggagtgggactgtccctcaggaggggaggggcacaggcctggcatggggataactgggaatggggtttggacacaggatgcctggcgactgtagggacacttgtctcatttcttgctctgttatataatataaatgcttagggaagcttagattcaatgggttgtgcccttccaaaagcctactgctggagtgaaaactggaaatacatctttgcatatgtgttctttcattttatttttcctactggtttgctaagcaaagagctggctttgtacaaaccccctctccccgctttttttttcttcttttcttaaaaagcttctgtgctcttttgaaacaagccaacaaaagttgaagccagtgtgtgtgcaactcagacctcatgagcaattcttttccaaaccaaattttaattcacagctgccagtttaggggcaatgctaagacccaaatcgtcctggcatctgaagcacctgtcctaatgttgagtactttaaatatggtgttcccatttcctaaatctcaatttagtctgtttggtcttacaattgtgagtataattatgggaaaatttaaatgggatacttgagtcaggactgtgttaaaaaatccaagatgtattgcttctgtaaggctagactaaaataatgaaaatattaagagcctaaagtatgctgctgctttttttttttttttttttttttgatacagagtcttactctgtcgcccaggctggagtgcagtggcgtgatctcggctcaccgcaacctccacctcctgggttcaagtgattttcctgcctcagcctcccgagtagctgggattacaggtgcccgccaccatcggctgatttttgtatttttagtagatatggggtttcacaatgttagtcaggctggtctcgaactcctgacctcaggtgatctacccgcctcagcctcccaaagttttgggattacaggcgtgagccactgcgcctagcctactactgctttttaactaaagtctgcctgcattccctctcttgccacaaaaggcaaacagagcttttggcacatttgattcctgaggcagccccatgcctgtttaacacagtgtagcttaactggttaaagcaccgggctagtaaacacatgactaggggctcaatcccttgtgggcctgttagtttatttactgcattcattggccacagacttcatccctaaagtggtcaagccatctcagacacgtttgcttctggtcacaccgatcaagattgatccagccactgaagtaatccaaacaactcacttctaatgggccagaggttgtcatcttcatacctgaggaatggcttgcattttataaaaattggagattcttctgctctcagaatagcagacacagggctgggcgcagtggctcatgcctgtaatcccagcactttgggaggccgaggcgggcagatcacctgaggtgtcaggagtttgagaccagcctaaccagtgtggtgaaaccccgtctctactaaaaatacaaaaattagccgggcgtggcggtgggcgcctgtagtcccagctactcgggaggctgagaaagaattgcttgaacctgggaggccgaggttgcagtgagccgagattgtgccattgcactccagcctgggcgacagagcaagattctgtctcaaaaaaaaaaaaaaaaaaaaaaaaaaagcagacacagaggtgaacttaacctgagattaaccagattcacagttcaatagcaaccacctttagagtccctaagctaagaaactgctatgattttgatgaaacagaaaggaggaaggtaactctagttctttctgaggcatccgacactcctttagaagggttttcccaggaagcctcattcactttcaggtaagcccattatgaagggataaggattttaccgtattccactggaataggggaaaaaaccatctcactttaacagaaagcatgcaagtgcccttttctggaggaggtgggaatgagggagtacacagactttagcttaaactgtggcaggagggtcttaattttggcagaacagggcatggtgttgcatctcacctgttccacgcttagtacaagcccttcttcccagtccctgtcacctgcctcattttgagctttcactgtattttcctgttgttccagggaagatgaagtgcatttaaatgctgcagttggatactgtgaagatgagaccccttagcctgtgggattaactttccatggagcccattctggagagacttgagagagcacctttaaaaggaagttagctaagatactgccctccgtttcagacagaggttggaaccagatcctggctgagagcagagaccagcttccactcagccatgcaccctaggagtggggattcagctctgtggctccaggaaggttaatcttcaatgttaatccgtttagataaagttgttagttaaaaggtaatctgtttagcctccctttccccattctcctgccagaaaagagggagttcaagtcttctttccaggactcctgtgttttggctgagactgattcttcactgtggccttgggagaaaagctgcctaaccagttctgggccctggctagttacaaccatgtgtgagttgtttacagtacgcacaggtatgggctgaagggaaacaaagcttaagggatgactagaaaggcttgctgaaattgctatgggagggccccaccctccaagccatctcccctcacaccccgctcggtttcagtttctgcagcttggttatgcgacattctcttaatccttttttgaatctggtctctacttaagcactcaagaaaactgctccacaaggattgttttagtggggttttaattttttaaaatgttcttgtttatttaaattgcttgaacaagggtttagctgtatgggaagagttcctgcctttagctatacatgtttccacccacttagacatgctgctcacccacagactcatacagcctccacagacacaaagcttctgtgtatcctacatgtacctgcaccccaattctgtcaacctccccacagctcttgactggctgtttatctattccattccactaccttcccaccccagccctcaaagtcccaaacagattgaaaaaaaaaaaaaaaatgggaggcagcaaaattgcttacttgcacgaaagggctcttgcctttgaggggagctctctaggcacctaatttctcttagatttctttctgccctcaaaggtacttgtggaatgtttgccgttaaacggttgtaaattaagggctgagtgtatgaagcgttaatgaaggctgccattggaaccagtccacgtcccgtcccggctggcaggtttgctgtccaagaagtctcttgctggaggcctgagttcctgagtgtcgggtttcagctctcctttcttcttttttcgtcttttcttctgcagctattttttcccctaccttccttataatccgtcccttcccttccttcttccatacccactccacccctacccctttggctttttctgaaagtaaccatgaggaacagagtcagaatgaggctagggaagcagcatttttttttttcttttcctgtagaaagcagggccaaaagggtgcattttatttttttctgcttttccttttatctctttgtgtttgcttcatttctttctctttaagtcaaggttgaaattgatgtttgcaaaagacaggaattttgaataactgcctgagttaaacagaatatggagaaactttgactctgtcccatgtattaaaaattaaaattagggcaaaataatgcggatttgtcctggaggacctggccagatgtagctagaggactttcacagtgctggtataattatacctggatatgggataatcttcactttaagcaactccattatgtgaaaatacagatccacagatacatatacaaataaacacttccaaaagaaatccttgtataattcaatgtaatatgtgtttttaagctacaatatgtaagccatcaaagtactgcattatttttagataacagacttttcagtttgtttaaggtgtgattacctttaccaaacatcatttctactcaaatagaatgcttacaataaactgtatggaggatacctacataagtcatgtcctgagtttatactatttcctagagacatctcttttatacatttcaagttttaagtttagtctgatgttttatacttttcagtttagtacctgaattgtatctatctatgaaataataacagataataattttaagcagatactgtttgctagacattaatgcaagacactctgtacattatgtcatttcatttttttttttttttttttttttttttttttttagagatgagtctctgtcacccaggctggagtgcagtggcacgatcacggctcactgcagcctctgcctcccaggttcaagcagttctcctgcctcagcctcccaggtagctgggactataggtgtgtgccaccacatccagctaatcttttgtattttagtagaaatgaggtttcactatgttgttcaggctagtctcgaacttctgagctcaggcaatccgcctgcctcagcttcccaaagtgctatgattacaggcgtgagccactgcgtccggcctatcatttaattctattgccacttccattttagaaatgaagtgacaaagcctcacagaggatatgtaagttgttcttgaccacactatgtttggttgcttgcctttgtatccacctgtgtttcatcattattgcacagtgttcccattactctaagggttacaatctgaggtcccttccaccctgacattcattcatttgtgcattcagcagttacatgtattgagtgcctactgtgtgccaggatgccctgccagtcaggccagcactcagtgataactactggtcacaggatctagtgatttggccttaacaaatgaaggctggacatgacccttttttattctgtcctgagagccgttgcctatgctatccacttattatagcggcattcatatgtaataaataacttatcaaaatagtcataaaggacttggcagacaaaatgaactgctagagaagactgcattaaattttaataggaagaattcttagtaataagtaggaaatgcatcttggtgtagaactgagtcattcttttgtggctttccctaagacatcttcatatcagtgactattttttttttcatttatgaaatactgtgcttttagacaaagtgtatttgaaatttctcactctgtttcccaagtaaataaacaaataaaagtaaagaatggaaaaagacaagacaaaccatcttcctttattccatagaggtggagtgccttctagtaacaagtgctgtgtgccgtgtatggaagacaccagtaatcacatcatagaccctaatctcaaggaacctgtgttcttgtggggcagtcaaagaaataggcctagtccagggtattaaatgctgtgatggggatactgagagagtatcctgggaatgtttaggagggcaccttattgtcttggtgaggatgacgcagtcacagaagtttcttctaaagagaagacacataggcagagatctaagaatgaattagagttctccagataaaggggatgtaaggggcagaggggagcagactggccgaagaacatttttgttaaaatccttttttttttgttttgaagaaatatgacttttgtcctaaaattccacagcagagcttccagggctatggtagggattaaggtattctacaacagatgaacaagtcttttagggacagcctggtgagtttaacctctgtagggctcctgtagaggaggcactctttgttatgggaagaacagggccctttttagtgagaagaggggccttgggtctctccagttttcctgattggctgtgctgatggcttttactcttctttaaaggaggcataatacaaccccgttaattgaaactccagtgtttagaatgtttggtggtttgtgaagccctcctgtaaaaggcaactgaccaagcatataaataaagctatgaaattaatacatacatgttgagcatttaaatgtgtagggtgctgggtttatgtactcaaggttgcttgcggggattatttagctggtttaaataaacaaacttttaaaaggctttataaagtaaacaacatctatttgcataccaattccaatttatactctgctcaaaaataggtctgatggtgcctctttgtggaaacagtttatcagtagttagagtttatgtctcataaagttttaagattttatttttcattaaaattctttgaattcagacacttttggtaattcatgccttccctccagtttccctagattgggtagattttcctggagttgcactctctatttttataataacataagcatattgatgatagtgaataggcaaaaggctgtgggtagtgtaagagcaattcttttcagcttcaagggatttttaaaaattctttcattattcaagagttgtaatttgttgtgtatatttaaaataactctcatctttcagtctctccaataaatgcattctgctatatggccaggtgtggtggctcacgcctgttatcccagtgctttgggaggccaaggcgggtagattgcttgaggccaggagtttgagaccagcctggccaacatgatgaaaccccatctgtattaaaagtacaaaaattagctgggagtggtggtggacgcctgtattcccagctcctcaggaggctgaggcacaagaattgtttgaacctgggaggcggaggttgcagtgagctacgaaaattgtttgaacctgggaggcggaggttgcagtgagctatgagaattgtttgaacctgggaggcgaaggtttcagtgagctgaggtagcgccgctgcactccagcctgaacaacagagtgagactctgtctcaataaaaagcattctgtataaatctatgatatctgagaatccgatgtcgtatttgcttattgtctctctttcctgctggaacataagctccatgatggcagggactttgtcttgttgctgtatccttagcaactagaacagtccctgctgcatggtagagtcttcatatttatttaatgagtgtatgaaacagttcattctttgtgcatggaaacatgatatttgcacattttataagatatattacattaatactaatattaatactgccttacatataacaagtttttttatgagaggaatttcagactcttataaaatcatttatttacagaagatggtataactaactctgacatgaggtactggggaagtatttcaaagtgacgttggaatgggatttctggatattgcaggatgcaagaggttgctgaagagcaagtttgtggcacaccaggctgtgagagcaccgcatgggcaaaggcccagggtcatatgatctgcagggccataacaggagtaagtagattggggtcagattatgccaggcgaggaattttatcttgaaggcagttggggactattgaaaaatcagaggacagtgcaagggaaggggatgagaggtaacaagatcagatttgtactttaaggtaattttggtgtctctgtggaggatggattaaagtgggggtgagattagaaaaaaatgagctagaaggtgagagatggtgtagtaagtgggatgaatgagtttaaaaagctatttttgcgattaaatttaagcaatttgctaatgggaaggtggtttgagggagaaggaagagttgatgttaataccaaggtttctagtttgtaagtgaagaatagcaatgtctcaaaggatatcaagattaccagaggctgaagaaagctactgaggaaggttagaaggagagagttgacgagttagattttgagtagcctgtaggatattcaagtggagctgtccaggaggcagttggaaatatatgactgaagcttcagagagaggtcagggctagagacataaatttggatataatcagtgtgtaaatagcgattgatgccgtgagagggaatgcagtgatccaagagagcctacacagtatagaagcagaccagggccaaaccctgagaaggccaaatatttggcaaggtggttagtggagaggttaagaacaggattatcagagaggcaagagaaaaatctggagggagtagcatcttaaaagccaaggggagtttgagaactataggttcatccgcatcattagatgccacagccttcctctgggctcttatacttctatcttaacatatattatgttaacttcatgtattttctatcaggttttcctatgtctgtgagctctgtgaaagcagggataaaaagtgtttcatctttgtgcataggccagaaatggcaaataggtttcatttcatgttccaagtctgagtattctcagctgagtccagagtctgcagagaagagtgccttcatccattagtgatttctgattagtgatttcaggatcagggactgatggcaacttgccctgtatttctcatgtctgcattaggcacttattcattcattattcaacagatacttactgagtgcccagcatgtgccaagtactgtgccaggtgctcaataaatgtttattgaataaatgttgaatggttaaaggaaggctcgcaacatcctttagaaggaatgggaaaggacctgagtgaggtgagccacctctgagagcccagctgaggccattttcagtgttgtgtgcctcaggtcatcctgccttccacctatgcggagtgtactggttaacacaaagtctctggtaaaagaatgccagattttaatgatttttaacaaaaatactttccacttttgtaagtatttaacttattagtgtgcacttgcatctcacttgatctttgcattaatccagcaagagagataggccatatgttgtcatctctattagacagatgaggaaatagagatatttattactaaaaatttgagtaagaaagcaaacactgagccagaattggaactgaggtctgactcccacttctaactcttgagagtatggctcagaaatgggcatctctagtcacaaaatgtggctgagctgtttgggcaactagcagagctggacaccttgtgattcagaggggctttcccatggaatgcagggggccacaggcagcattttggatggtacaaggttggtaggaggaagagaagaaatgattggctcccagaggcttcatgggctcccaattcatgattctttctctgtggctaatttttgttaagtataagaattccaggaatctcttaggaattgtggagactgctttctcctgaaatataaaacatctgctcttggtctctttggagctccactgtctgaggggaaaacagggaaaaagaggtaatataaaacagacattgtttcagacaataaatccccctttactcattaatgagaaaataaatttagggccagaggtgtcagacttttcaggaggcctctttgttcttttcttttctttttttttaataatttaaaaaagttcccacactacactgatgtacaggaaacttctcttaacattgccttttttattttttctttcctgagtgataagttcagaacaagagaccaagtctctggggacacaaaattgagcgtgctggttggacacagctgttccctgtaacccaccctgcttcagcatgttaggcacatttttttgtaccagtattttcttcctgaaatcctaggtaagaacacctgaggggatagatggcatggcaggacacgtataacagtctgaaaaatgtgtaggcaaattcctaaaatcaccattttcctgtcgccacacccttctttcccttttcttttaaatgtcctccatcccctcaaatcccatttctctcctcaggctccttgaggctttcccattccacatttctctggatcctctgagattctcggcttcttctagagtactagggactgctttttgagcaaatctgtgtgagccgcatggatttcatgaaatcacctaaaacctttctgttgcgcttggtaagagccttggatagggaaaggaaggggtagacaggcttagaggcagagactattcttacctggcttacagttgtattcccagcacctaagccagtgactggcacgtagtaggcactcagtctttctttagttaaatacaatgaataatttaatgttgggggggatatggtaaaagaagaagaggagagttggaaaactcatgggcatcttcaacagacaggagccccatgactggggggtgtcttagcaaaaggcttcctggcgtcataacagaagtagtcacagaacccccaagaccggaacctgttacaccagagggttggtgcacattcacgatgccctctgtcgaagggccccaccttccatgcctgcgcgtctccttttgttctgtcaggtttagcattgaggcaattggtggccgccgcctcctttgcctcatctgccccaaatccctgcttgccatcagcccaatgcagcaggctctggtgccaaccacaatctccccgggaaagagatttgagggactggaattgtgagagaaatgtaagctctgagcttgacggtggtccatgagcccctccccttctcacctttgaagcaagaaggggctggttccagggctctgtgggaaagctgctttgaagaatggtgaacttgggccacggggcatcattctgctttagttgagggggtccctgttgggttccaaagagaatgcggtggggttaacataaaagcagagtttagcagtgaggaacccattggtctatggcctgctttcttaattgttagtgaattaagccaggaaggcactgggggtggctggggagatcctttgtaagaggttaaggtcttcatagagtgatgataggattagcaataatttggtggaaacaaacaagcagaataccaggagagctacaagcgatcggttctgtactgtgtccctgtgttctctggttcaccaaggaccttaggcctgttgtcctaaatgatcacagggctggcatcacccttgctgtgatgggctggcaggccaatgtgcttggccctcctgccaaaagtatctacgcacattctgccatggatggtacatttgcatgctcccctctccttaaaatctgagctgggagatggggaagaatgaaaggagaaaatcaaattaaatgtttgaccagcagaatgaattctgtctccagtgaggctggcttgcatttgtcttgctttttattttctgaactttctctcaccataaatcctttttcctttccttttacccattaaaatgtttttactctttgtgccagcactttgtcctttggctctttctgtgtctgtcccagctccataatcctccccatgttcttttgctcactttcttgtctcctgatctgaaccccagcctttcactttgaaatgcttttttctttctcagatttcaggatttctttcttgccttagagtgggatgttcacttaaccctttttggggtctgtttttctctctaactttgggcctttttcacatttctgtgtttcttttttctctttttgagacggagtcttactctgtcgcccaggctagagtgcagtggcgcaatctcggctcactgcaagctccgcctcccgggttcatgccattcttctgcctcagcctcccgagtagctgggactacaggcgcccgccaccacgcccggctaatttttttgtatttttagtagagacggggtttcaccgtgttagccaggatggtctcgatctcctgacctcgtgatccgcccgcctcggcctcccaaagtgctgggattacaggcgtgagccaccgcgcccggccttctgtgtttcaaataatgatgcttgtgtatacataatcactggggctcagttctctttttgattgtctgtttagaggaatgccttggttaggaaaaaaaaaaaattggctcctggactttgccatccaatgcctgtttctttgctttgaggcttgggaataaaaattacttagctcatctactctgctggaagagtagagaagagggtgacataccccacaggaaatggggacaagcccattttggagggaggctgcctgattttttaggagatagggagtgaggacctgctctgtgcctggcctcccactaacatttctcgcatctcactttacctccagcaagaggagagctgacagcctgcaacaatgccctcctttcttctcccagggccggtgttttgatagtgtcaggttacaccccagcctccccttggcccatttataaacctgacacaggcaacatgatgtaatgttatttttcaggatctcaatgaggaaattttttgccccaggtcagaagaatgctagttgatttttgctgaaatgaaccatggcacagtataatatatgggctcctagttcaagaaggtggaggcggggctagggtggtgtattgcactgaagttggtaggttgtaataaagctttttctgcttggaccttccacctctgggcgcctcagccaacctatcattgttgagaaacacccttgtagaagcaggcttgggagctgccccttttaatgcaattttgcattgttctggtgccatagtcttgatttcaaatgcgtcgccattgagcagctgcaacggttgagactaatctagaaagtgaccacagaaaggaaagggggatggggggacttctatgtgaccaagtttgtcttctaggctagcgtttagccacctctcgtagctctggtttctctggctctgctcgagcagtgctgctggacttggtggcgggaatagaaagggaaactggctatggcttccttttacttcctgcctcttcctccttccctcaccccatgatatctgtacctaaaaaatgtcagaaaagtcccatttttgtatttacattttttttttgtgaatgaaaagagacaaaagattctagactggaaaggtgcctggcactcagctggagcactgccctaggcggaggaagagatgcagaatatgatggggctcccacctctgttcccgtcttcctggtccctctccccttctggaggtgactgagttgctggtgtctcatgagatgtgataaagcatcctggttaagagcactggagatagtatccagcttggctttccatcctgttatgaattggcagattaaccttggacaagtgatttgaactctgcctcagttcttaatctgttgagtatgaagaaaaatagacctacctcccagggttattgggcagtttaaatgagttaatgtatacaaagtatttacatcagtgtgtggcacccagggatcactgtatgagaatttcctgaacaacaacaacaaaaaaacccttctagaaatatttttacaaattatgaatgtattttcctaattttgaaaatacaactagtagaataccatgaatactgttctgcaccttgcttttatttatttatgtatttagcttgtttcttagcaatgtcaagccttatgttccaatttgtgagctatagtgttttgttaccatccctgtaagacaaagcatctaaagtaatcacctaggtatgcatacggaaaacctttctggactgtcagggaaagcattttatcccaactgccctgaacttgtcactcttctctgagcaggtcacaccccttgctgactcagcctttgtactgtgttctctgccttgaattcattctctcttctccacgctacctggcaaactgtttttcctccttcaggaatcagctgaagtatcaggattgccgtaaagctattcctaactttctccaggctctcctgtgagcccccctagcattgtgtgtctgtctgtgagccagccttggcacacagtgttgcggttatgatctgtgtatatgtgcacgtgggggcccagagctctcccacgctgaacaccagcaattagtacagtgtctgttacatagtcatgctccatgtttttaacaaataaacaataagtactttttggtgacaacatcagtttccttgtcttccttctcttctggtgagagtgtcttgaggtagaaacgaagaaatctgactccaccctagcacctgaccaaactcttagtcccactccaaagcatgctctaagctggactttacctgggggctgcaggtagattgccccttcagctactctgtcttctcctggaacctacagtggagatcccagtatgcaccgagaaccttagaagactttctggcatgtacttattgctttgctagtaaagcagcacttgagcagatcaactccatcaactcccaggatgaccttcctctggtatttctgtggggtgtctgttgttggggaagcagaagcacaaagcagaagaaaccaagcacagttccttgcccagaatcactcgggaggcaaagtacaattccgttcttccttatgttgggaccttcggtgattgggtcctccttgtgtgtggaagtacatgaaagaaggatagacaaaattagagcatgttttcgagaccatttggttcagcctctctgattttacaaatgaggagagtgatgcaaagtgtggttaagtgactataccgaggacacagacctactttatgacagaggcttgggagccagattttaggatgccggtagttctaaagtatctagctgtgctgccgtctgaatttctggttcactccatcaggtcagcccatagacacctcctttttcttaggtcggacctatcttattcgtttcctcttttgttctctgcagctgccacccccactcctacctcccctattctctatgttgacatgtgacttggggcacttgcaacgtccctacctaaaattgatgtttgccacctggctgctgactggtgcgctatgctgcttcactctgcctgtttcaaccctgtgaaatatggaagcagatcataaaaaaatggactcccacacattttgcagatctaaattgggccttaatataatgtacttggttatgacaaacaggttttctagggcatgaccggcagcttaggctggcttccctggtcatgtcagttgaattctttttttctttttttgagttgggagtctcactctgccgcccaggctatagtgcagtggcatgatcttggcttaccacagcctccacctcctgggttcaagcgattctcttgcctcagcctcctgagtagctgggactacaggagcctgtcaccacgcctggctaattttttgtgtttttaatagagtcagggtttcaccatgttgaccaggctggtcttgaactcctgacctcaggtgatctgcccacttcggcctcccaaagtgctgagattacaggtgtgattcactgtgcctggcctcagttgaactctttaagattattcaactctttccttaattcttaggtagtcaggattcttcaaaactttatgtttctctgggagtcaaaggaagtttatggacacaatttctccatatagtagcttatttctgaaaataagaaaaatgagtaagttggacctcatttctttttctaacaatgtgtgggttaccctggtcttgttgaccagtttatttccatttctacttgttgaaataacctttcaaataaccacaaggaatttttaaataactaagtcactatctttttctctaggttcaattttctagcactgatagatataaaagaaagtaataataacattcttttttttagaataattttttttttcttttcaggcaagtaactatttgttcaggtgtaatattcctgattttatactgtggtgattccctatagatgacaactgctcaaactctagccttctaaatgttaggtaccaaattgacctttttgtaatcaatttgtttttatctagctttattaacagccagccgccgcaccgttgattggatcgacgaggtggtgatgtgaaacaatcgctaaacgtggccaaagtaaccagactgacttttgtgtggtttttgttttctggacaaggattctgttagttagaacagcatttaattgtgcccaccacaactaaataaaacccacgagacagttacaaatgaactgtcacaagaggggaggagtgaagtagaaggagccagagggagagcctacaggccttctgtgaatgaccacaaaccctctcgactttgggatttggcctccctgggttggatatgcctggaagggtcgcagaggttaagagccaggagtctggggaggccagggtattgtgtttggttacagaggtgccttccaggtgatcaccatggaaatgcctttcactggggtctccagagatgaaaaattcaggatatgtctatgtgaaatatggtcttgtaaaccatgggatagggatgggaaaagttggcttagtctctctctctctctccacctctggagtggcagctgtgtgactccctgtaaactttcaaatggtggttcttcatgcccggggatgattccgtgtgtcaacaagtctgggcagtctttgatgtagccaccagcgtctaggccaggaggcacactgctgctgcctggtgccctcatgatcattctctgtgccttctgctgccctctcagcccctgggtctccctccccaggtcctccttactcctgctcctgtgacgaggggtgggaagctccgtttactgatctatatattattgtgttggtgggaaacactggctaggccaaataataatgtcttgcaattacttagcattatcttgggtgtatctcccttgagaaatatattcctggaaatataccagtaaaatgagtttcggttagctgaatcatattttatagccattgaagttattaatgtagaaatttttctcaaggacaaaaacctgactgaggccatctcaacctcactgaaattttcagtgaaggttaagaggcatattctctgataaatacaaggtaagaacacttcatgtgacagaaaaaaaaatccaaaattgcatgttcccaatgctaacttcagagggagctgcattttctgagattattccgtccttttacatgcagtgataattactaatatgtattgatactcatcatgtgctaggcatagtgctaaacccattgacatagatcatttcacataatcctcataataatcctttgagaaatggaatatgtttattctgatttacagattttgagactgaggttcaaataagttaagtaatttgctcaaggccatacagctgttaaatggtagaactgggacttgaacccacctggagtccagatccagaggtcatattttattacctcttgactatctttttcctgttataaaatagtataacttcatcttaaatattattttaaaaactcctcaaatttatatgctaaagctcattggccatgtgctggtgcctttaaatttttatcccccctagagattataactaagactaatgtctgtggctactcaacccagttggttagagctaatgggaccaaggtgacaaggttcagcccccatttgagtctgttagctgggctgagtttcatggccacagaattaacctttcaccttggccagctgcctcacaaatgcatgttgttgatcagagagaataaggaggagattgtggataaaatggcacagaccgctagatcagccacccaagactatggatggtggttcagtaatgttttctttccaatatgggatcagacattattgccatgtatagtagtttaaaacagcatttcttggtgtgctccttggagctggttatttgttttagtgtttgtatgtgaggaagcgttgtattgccaagtaagattgggagttaaaagagctttctgaactacagggcttccccgaggtttaatatgttaatgtgtgttgtaaatctctcagaggggtgtgtgtggtggagtggttagcattttcagaatttatttgacctgaggaccttttccctggaccaggattcttaaaaacacactttagaaaattgtgtcttaaaaatgtacttgctttgttctgttattttaaatccctatagtagtctttccacattggggatcagttacagttaaaaaagaccagtttccatattccactaacttctacatgtgtggatctcctttcagcaggctctatctttacctccaaagtgcttccgcatctcttgtcccattttcttttttttgccctatattttaaaccaggattctgttgctggccataacacataccccaaatcagtaacatctcagggattagaacccagatctctggcccatttttctttccagcggcctatgctgcctcccagtggacagagcatttgcaaagagcagagatcataatgcttaattcttttctagaaagcgtttgcctggtgtctgtgagcatttctctggcctgccattgctcttgaattataaggtggcattgtcgtaactctgtaagcaagactgaacaactctcctcctccccgcctccccaccaccaaaattaagtgcattattagcaaacacttaaaagttcggagaggagattctaagttgacttaccccagggagaataatcacggcgggggggggggggcactcaagatgatcagcactagcccagccttctcccaggctggggtaagggtttcctggggagtgctgaagtgcacttgaaccttgtcaatgactgtctcctactccgttgctcacttgctcttgtctcggtttaattttgcacagctccagtggaaatttcagtgatctgataatttggaaaataaatgaaagagtggaagataaatttttattttccttttctcaaaaaaattacacccaagtgaataatctttatgctctatttctcagtaatatttagatgctactcctgaagaatagcagagctgccaaaatcagtagggtttttttaccaagctctgcttcagtaatcctatcacttgcctgaagaattcattataacgaaataaacacattaggaactccttggtcttttacatctctaatatttatgaagtactgaggctctgagccagccaataaggaagctggcaattcacagcaatcagtttaataggcattggttgatttggattgcaaaatataggtgccctgattagccctctatatggacttgcgttgttcttcagccattcaaaagctacctaattatgaatattgaagtataatgttctggcttttaacataaggcacttaccttttaattggccatcagctttgtttttagcgcttatgtacctccactgggattcaaatgaaatggggagataatcaaccagtaagcagagaaaagggtaaaatgatcagggataattaagtggcagcagggaaatttagggttagacaacagggagagaaacaaaagaaggaaactcacaggaaaccagctctctgccacactgccaggcacaccccttttgaaaccacctttgattccctctttagcttacaggtgggacacatatagactttgtggctgacatctatcagcttgagcacaaacttgattcctccctgcgcctaaactcagagccaggcagagggtggggcattggatcttcactgcacaaacttggcagaggaaaaaagaccattaagtgaaggctaattggaatctgccccaaactgcactttgttggagctatttacaatatctttcaagcagctgacttacttactgggttattcagtgaaggggcagtgagtgaggggatcggtggggagtgctcaaggagaggaaaatgacctatacaaggcagtgggtgctttcttacacctttgaaaaattaactcctacaccatcttagtccttggtacaaagcctaagtactcgccttgaccacagggagcagttcacctcccttgggtcatgtgtccctttattttctgaggaaatttatggtctagttccagaaaattagcctagatacacacattttttttttccccatggaatttcaggaagctgaggaactcctgaaagaccatccatggatcttctagttttttcaggttaaaaaaaatcctgtttttagatccagaagtagggctggaagcaatttttatacataattgtggagagtgaagtggagaaagcctaggaaaaataatgagtttgccttttaaatatttctttggaggccaggcgccgtggcccatgcctgtaatcccagcactttgggaggccgaggtgggaggatcacttgagcctaggagtttgagaccagcctaagcatttgagaccagcctggtcaacatagtgagaccctgtttctacaaaaaattaaagaattagccaggcgtggtagcacacatctgtagtcctagctactcaggaggctgaggtgggaggatcacttgagcccagggaggtcaaggctgcagtgagccatgattggacctggcagcagagtgagatcctatcaaaaaaccagcaaaaccagcaaatctttatagaaaaacatgaacttcttttaaaaaatttgtattaaggtactttaaaaacaccatttgtatttgaagatccaaaatagcacatctgttttacttattcaagcagatttcataaggcattattttgaggctatattttgttagtgtaattctagctaattctaatttttatatgcattgaaacatgataaaattatgcatctttaaaaatagccctttttgcagtttaggcttaaggaagttcatatgcgtgcatgtgcatttgtgagtatgtgggtgtgtgtgtgcaatcttttttcttttttgttccacctcaccaccctgtgacatgaaatagggacttgtctataaccatattctcgtggcctaaaatcaggtctggtgctgagtaggttgctgaatacatgattaattttgtaactgttgacttcaggttttgagaggaaagtcaaagaaatgttttcccctatattcttttcttttctttttttttttgtgatggagtcttgctctgtcacccaggctggagtgcagtggtgcgatctcgcctcactgcaacctctgcctcccgggcttaagcgattttcctgcttcagcctcccgagtagctgggattacaggcacctgctgccacgccaagctaatttttatattttgattagaaacagggtttcactgtgttggccaggctggtcttgaactcctgacctcaggtgatccacccacctcagcctcccaaagtgctggggttacaggcgtgagccactgcgcccggcattaaaaaaaaattaattaattttttgagatggagtcttgctctgttgccaagctggagtgcagtggcacagtcttggctcactgcaacctccgcctcccggattcaagcgattctcctgcctcagcctctggagtagctgggactacaggcgcgtgacaccatgcccagctaatttttgtatttttagtagagacggggtttcgctatgttggcctggatggtctcgatctcttgaccttgtgatccgcctgcctcagcctcccaaagtgctggaattacaggcatgagccaccgcgcccttcctcccctattttcttaacagtcttccttctctttctgtctgtctgtatttgtattttgccttccttttcttttatccccaacgggggcgagaattaggttcccagaaactattatgaacattttccttggctgatagcactatgagaaagcatcgcaaaggactgcctggggggtgctatttagtacagggggatgggatacggactggtttactgtaggttctccttcaggggctgatttagcttggtggctctgcagtcttaggctggcctagttgcccatttcataagccacacaaggctactggactgaaataatcatgaaacaagaggccatccctcttgttgcacagtctatctttttggccataattaagaatcattcacgtccagggtgcacatttagccaatggagtttcttaactcctttgagaaaaggatcaatggacatacctgaacagaaaggtttctgtggttccataatgtaagagttccaagtgcacagaggatgattcctgagtctgcccatcgaataggcatttgggtagattttttttttctacaatttgacttccatcttccttaagaatgagaagttaggaccagaagaaaagctcccatctttcacactaaatacgttctataaaaccaagcaactttgattcttcctccctgtaaatgaaccctggttgcatagcttttgatgtgtcaagtcaggtgtcagacaagctagagggtataggaaatacttccatttaggcaccatctaagtttacccagcctctcttctgcattgacattggctgtaatccttgtaaatgctgagtatactcttctttccgtgtgggcccaggaggcaaggctaggctggaagtgatcactaggtaggagaaggcgtcttgttggaaggagctggtgtaaaacagcgggttgccaggcctctgttcccagcgttgtctcttgtgaagctgttccaaggaagccacatttctctctgggccgcactgttgtgagtgcctaggatgcttccggtggatctgtgtgaaatgtcaagtccacagaggttagcctagaatctctgtgctgaaagactagcaggatttttggactccaaagttctggattgatctttttctatcgtaatgactagatgagtgaggttctcctgattgtttctgaggctgcttgttccctatgccctcagcctgtgaccaaggtatagctcactcggactgagtgcttccttgttcaggatgaattaagcacttgatgtgcacatgctgttaactcatctcccccaactcctttgaattctctacccatcatgtacttggccactttcctgagccaagcacttcattatcttcttgtcctgtgagtcctaatagatatatttagaaacacttctatgaaatatggaatccaggcttaaccagctgtttgaaatcacaacccacaaccactttgctggtgtgtgctcacacacacacacacactgacacatgcttgctatacatacatacacacagtttccatcttttttttttttttttttttgagacagagtcttgctctttcgcccaggctggagtgcacttggctcactgcaacctctgcctcccaggttcaagcaattctcctgcctcagcctcccaagtagctgggactacaggcacgtgccactacacccggctaatttttgtatttttagtagagactgagttttgccgtgttggccaggctgatcttgaactcctgacctcgtgatccacctgcctcggcctcccaaagtgctaggattacaggcatgagccaacacgcctggccagttgccatcttttttatgtgctttccttccttctctcttctctagatgtagcatgtctataatctctggaggtaagccccgcctcgttacacacaagaggatcatgactaatgcggtgtatatagatagatagagatatctaccagcatgttaataaagggcctgatagggaatcgaagaacgtcacccccaggtaattgcccacagtcttctgtagccactgctggagagggcgtggtgtgggaatgggggagatgggcacacccgtgtgcaccatgtgttaggtggcaggaaagaaggagatttctgaattttatttttttcttgtctaggaaatttttaaagcttcttctgcttagagccttgccagggtctaattcccacacaggtgggagtgggtgcattaggtttcacctttttacgcccaagcagccatctcactgccaaagtcgtgcttactgatgcactcctttgactgtgtttctctgccttttcctcgtgccttgcatctcctctctgtgcttgcctttgtctctctgtgtctctgtctatgcctttgtggctagcatcttggtgcttggatattccccacttctctgtgcttcttggttcctgcagagcctgccttgtgcctttcattaccacgttaacaaactcgagtcgtgcctaacgacgtcgcctcatacgttatgctaatgatcaagagacatgttaatgatattttagaagcctaattagtggaatatataactatatgcaatttggtaatggactgtgacaacaagttgtgaaaagggggcttgacaaatccagttgcatgtggcctcagacaaacaggagctgagaatggatgagtggaaatcagacagggagatagaaggaggaagtgtgtattgggggtgtgaatgcctgtgtgtacacttaacgtgagggtcaatctttcttataggtagcattgctgtcttgtcatcattccactgtcctaaaaccacagggctaactgtatctgaagaattatttactgatgttttttaagcaattgctactgttgccattgatcatactggtatatctttgttagaaatgttattttgattatgttattcttcacaacatccttacttgcaatttgtaatgggagaggtacacatagaagataggttcttgtgccaaaaagaagttttattgtgttataaaccaacaatcaagaccatgtaagctcagaaataatctgtattgtgtctatcaacattttgatagtattggtaggagtaaaacaaggagtggtatgtgtaaaatcattcagctgtttgaatgtcattttctctcaatgaaagaattggttagaggcatgcattccttcagctggtatctttcttcctctaacatggtgattctcaatttgtgggccacggaccctgagggagccttgaagttgttaaaaaggtttagtaaattcatgcacataccaagcattgtctgtaaacagaataatgtcatggacacacatgcagataaatatacctactaaaattctttgaatgtatgaaatgctattgtggttaatgaaatgcacattcacttaaacaagcattttttcagttcctataggttttttttattcatgtgtatcattcctccatctgtagaagctaaaaatacaataactctcttatagtggtacttgcaatgttttgacattaagagagagactatacattcacagaggttgggagcttctgtctagcctgttgtccaaaactgcttataaaatttagcaactaattttcacttttgacaactattttaattctagaaaataggtttataaagattttcttaaagtgttatctatccttccaatgacttattataaattttagaatgtatttctatagggtggaaaaatctcctttagtcagaattgaacagttttcatgaagaacatgttacaccatgtagaaacatgggtactgcagggcataggtggcactagcttatgggagcctgaattccagaaacttgattttactttttgtttaggattaaaatgccaaaaagagggaggcttgcagtatcacacttcaccaccaggtaaagcttttagaaacatatattcagtgtgaaaatgccccaagtttgcagcttcttgacggataaagacagttacagagacaaagaaagttagtgttttatgaattagtcctctactcttgaagtagtatagcttatcggcaatgaggtacatttgtatttttttctcggctgttcttcctgaggaaatacaccatgttaccattgaggaagttcttcttctctctttccccgtacatttttattgtacgcagaaagacagaagaaggaagccctgaaggaagattgtgtatgaacccaggattctgttattacgtctgatgtttgtttctagttaaaaatgagaagtaatttttgggagggagacagaaatgggaaaagtttataagcgagccagtggaaaaagcacattcattatcagtgtctttctcactgagtcgtttgaaattggaaaattagcagcttctttgaagctcataagatctttcatctttgtgtatgtgagtgtgtgtgtgttaatactaagtggagattctttctcttgccacttatttggtttttctgctaataatgaaattataatgagatccctgatgggatttaaaaaaaaaaaaaaagaaaaaaaacaccttacatgaattatcccattcccccaccctccttctgcctttctgtaaaatctattctgcataataggtctttgtttctggatttgtgacagaattgaaggaggccaggagtcggaactgcccctcattgttctttttggtgactaggatacaaagttctgttcggcacagagtactctcctctgcttctacctccgggaaccccgttaccccccagcccacacaccaccaccccagttttgggtggggagaaggcaaaggtgagtgttcgatatctttgcaggctgaatggccagttgacttgagatgcatataccatgccttcccccttttatctttaaggattcatgacatgggctgctgttgagggaaccacacatctatcttgatggcagaaatacggtatttggaaatcctgggaaaacctctctcaggataacattttcagtagtaggttttcctccctgttacctctggttcctattccattgccctttatcagtacaggcttttgaaaatgccatggattaaagaggtcccactgcccagggctgagcatttctttgcccggcctggtctctgctagtgggtgggtaagtggagcctttggaagaaggaatcggtgtatggactgttcaagacagacacatacttatctaatttaggcatttctagctgtaggaaaggcaatgatgtgatctattccaatgaagagtttacactttggaaactcagtttcagaaaattcttccataatccaacctaaatcttttctgctttactattttgtcttaagccagagataggcaactgctgttttcccgtcttaaaactctagaaaactggagtgtagagaatgggcaagatgagaatgcctcgtctatgtatgtggcttagtcaaaagctatttcctgaatctctcgtgtttagattttctcatcaacgttaatgaccactttcagggcctcactccctgctccccatcatgcctgcaggttccccctctctttcttctcaccatttaacaggtataataaaggtggggaatctttacagttggtgattttatatcatagatcaaagatcaaagcagaggaatacacagcaaccataaaattaactgctttttcaattttacaatgctttcagtgatagagaatcttataaatttaatattaattaaacacttagcttttaacctcctcctgcatctccttttggctggtggctggaaaaaattaattgggcatcttaaatcttgtattactaatgccttgacaggaggggtttcagaagcacttagaacttcagcaaaatgtacttggagcatttgtccttccactcacctaattgaaaatgcccccttttttccttaaggaaaaatgaaccatttgcaaatttttttttaaaggaagcataagttacagtcccctttcatagccaaagctttaactcagtcccttggcactttaacacttcacaaaatggaagccattgaacttccattattataaatgctctattgatttttgagtgtgttggtaccgatgtgtggccggcaattgcttggcctaatcattgtgtcacctgaagcctatgcatgttcaatccagcaagaggtgcctcctgttttggtgagctcactttggcatggtagagtcagaggtggtggcatttgagaatggacccgcagcatcgtgaacaggaaagctagaatatcagtgaaaggaaataatatttctcttgaaggaagcctcaagagatgggaagccaatgtgatggaggagatgttttggggaagctagactaggctgttcacattttcttagctctggaaggaatagacgatgggcttttgttgggggacaagcatttctctctttaaaagccaggcaggcattcatggctgtgcttcagaagtggctcagtagaaataataataccaatacattgcatctcttttgtattttttttctccagtgggcttggagaactttatccagataatctcatttttctcacacatcactgtgttagagaagaaggcccctgaatttacccaagctggttctctgctatgaccgtatatttgaaactagcaactggaaattatagtgaatagagcaagaaccccaagaatggatctttctgtacctgttttagattcaggtaactgagaaaagtatgttaattgctttttggggacatctgttcctagcacagtgctcagtgaaatcccttgggtttatgagtacctgacttggagaagaattataagaaacaaaatttgggggagaatttaaaatgtcattatttactttacaaaaaagttttaaaaattttactctgaaaggcttcactgcaggtttgctttaaattgctaagttttctagtcctgtagtcatctaatgagactataaatcagtttacaactgatactttagaagcatattttttgagtaaggtaagggatatagaacatgcagcatgacagtcccctatctcctgctctgggttgcaatggtctctttctccgagtccgaacagtcaccttgacaatccttgatggcagtagggagcatttaatccaactgtgaaataataaattagctgtggagtcaccaccagaacagggaatcctggctttatgcacctggctagtttgcactccctgtgaaaccatcacggttccttctcattgcagctgagctttctgaatcttttaagaactgaattgatgggatgtggaatttgatagccgataaattaaggatattggtaaatgtagcaactctattagaagatagcatttccaagatcagtagcaacatttgcttgcgttgtttgtgagtgtatctgtggaggtcctttatatctgtatctctctctttctctctctatctagatatatatgatatgtggggtgctataaaatttttagtgccttagtttgggttgaccgccttattactcacgagtgagctatacaggtcttccttaacaagtggcaataaaggctttacagcaccccttacaccgtcacatatttttgtttaggccacatattgtctttttctttttaagtctccctttgctcatgtccctctcaagtacctttgttgccatggcaacagttccatcgtttcttagggtagagcaggatgacatctcacgcaagattcttgaagtcagtgcttgtttggactgacctcaaacactcagctggggccagtgctgtggcccttaccctggtcatctgtgacactgttttctcttttttgctcgaggctctgtttattagactgccatgtctgtctctacattaatattggccgtgtctccatggacctgttccaaggaatggaaagaagctgatactcatgatctaaaattgaaaaaaaaaatgttagtgttaagcattttgagttaaatatggagctttgtgagtggttggatgcatagtaaatactgtggcaagatggaaagagtgagggcagctcatcctctgcatgtcaatgttctctttggaattccctcacgggctcagttttgacaggttaccatgtgcatttttcagtcctctctgtgtgtctttaagacccagcagacctaccttctccctgactcatggaatattagtcctaaaagggagtcacagaactgagtccagtgcactgattacattcttagggaaactgagacccaaaggggcatgtgtcttgctaagatcactcatcctttattggtgcagatgggatgaaaacccacatctcccagtcttcagttgggcttcacctttgctacaatttgttagttttttaaaacagaaattatttgaaagattttactgtcaagctaatttcctctcaagccactgcaacatttctgtaaaaagtggctgtagccatagtggagacctcatctggcaaatgtggacaggtggtgaggctgtacctccaaatttcttaattctttttccaacaagaaggttggcttgccaattctttgatcaaaggtaggagtttctgtaatctgttctcttaaccacatttgggatgcttgtatatatgactacatatatttatatattttttatgggcaatattttgactgtttctcttttgaaagacagtgcgaatgagtatgccaaaaatcacagatgatatgagaaatgctatcaataaaagcattttttcagaaaggtgaataaagtaaccccaagataacgtaaaatttttcctaatgttattttgcaaagtcattagaaaacctaatgcttgtgaccaatggggtgatgctcgtgggacagtacgtggctgacgttgtggttttcactgggcaaaataattcagatctacgagtcttttggcatgggcatagacagaaagattgcataatttgttcttggatgacgtgaaaaagaaccctgaatatatttttcgtttctatgcttccaaagtctgagtgggatgttttacatggatgggtaagatgggattttaggagacagataatgctctgttttagatcttcacttggtctttccaacttgtaggggtggtgtggtgatcacctatttgactagtggttatgctgttttcatatttaagctgcctgtagcaattcgtgatttgctatcagtacatctgtcaatctgtaatattacactcaatatcattcttcttttacccaaatatttggtaaaagagaaagctaacatgcactaggttcctaccaagcagataagatgagataatctatgtaaagtacatagtataaccctgaaagggattattagtcccacttgacagatgtggaaaatgagccctagagagattaaataaaatagaaccttctatgactaagtgactaaattcaggtctctgatttcaaagcccatactctttcctctgagttgcattgcccctaccaggtacttggcaattactgtcttgtgcaatctttggatctttgccttgataatgtgcttaatcattcccttcacagttcatagtaaagtaagaatgacgagcatttagcatcatcacacacaagcctaagagtcagcaagactcaccttactgtaaagctagcttcatcagctccagcagctttccaggtagcaagatgtcactggcagagtggataatgaactagcacatgggctgcatcaggaagccctggggacctcgcagaagttgagagtgtggagtgggagaatgggaggagtaatatattaaccttactgatacacaaagttgctccttctttttcttgcaggttagtgcacataattgttatctcactattactgtgttgtttttgtttttgtttggctttgcagtttaagatagcttttaaaagccaccatctggtttaggtgctagatgaaagttctggttaaaaccaaacgaatagtttcataacctagtgagagagttttttttttcttttttttttttctacagtattcaaagtgctttctgaacaaacttaaatttgtttggatgtaagcaacacagagaagtcagaaaacaaggctctcagattcaagtaataaaagcatgggagctggaggagagggacaaaaaaattaagtaaaagaggaaaataaaaactctcactctgcattgacccttttactgaggtgtaaggtacaaagcataaataatccacatggagagtgacaagtccacttacttaattcattatttattttagttattggagaagctcatttctgcttagcctccgggcatatttacaagtgtgatagaaaaaagacagtccctgccattgctatttacaatctacaatagataatatataaacaagacatattattttagtagacagatgcatccagatacactttaaacaaacaagagtacagcaattaatgtgcatatgaaatccgtaagataaatcagctattgtagcacgtgaaggaaattaatacaaattaaggaattggaactgatttgggccatattcgactattttcatattaagaaacattattttagaagatctgtttggctgcagcggagtcaggaactgggcaagcagtgttgtgacttgcttgttccacaggcagagcctgggcagcactcaataacacccctcaccttcataggccatcagccgtagagaggcaaattagagcactggcataagccacaaatcacaggctgttgttagatttagtctgacccttagcatcattttatcggagtcctcttgaatttaatgtgattcccttcacaccaccccctctctggacaaatactaatattgttattgttatcgccatgattacttgtggctgacctaatacccttctgccctgaaaccacaggaccttgccgcagcctaggcattaatagccctcacagcacctcattgacatggctgcactggagttgaagttacaaagcaggaagtatcatttagtgcccctgctaccctcgcccctttcatctttattatgcagtttcttcttatggtgctgcccattttcccaaggaattaaagtcgcagatattttgatttcaggggagggtgagggggaagttgggctctgagtgtagagaagcaagagctggcacacctgtccttaggttcacagcacagcctttctcctgctggacacaggagtaggatgaaaagccaacatcaataaccttgagtatatagtttcataatccatgaataatttcaggaattacagatgtactcttagtgtagaacatgcagaatgcccaccgtggattcaacactgtgcaaactatgtgtttggggttttttctcaattggtggctttatatcaacctccccagcacacttatatctaggcttttataatgattaatacactaggaagaatcagtggtacggacacattggacatgtggtatttatggtctagaggatattattaccaggaactcattggtgctctccacaagtttgatgttggttgagcagtaaacacggaggcacaaaaggatataattaaggtgactctggaagtcatctaaaaagtgggaaatggattttatggtgcctagatcctagggttcatgtagagttaagacctggaagagactttggaaatccccagtcttgttttatagataagaaaacctagagtggatatcagtttgcttaaggtcatacaattagtcaatggcatagctaagactcaaaactagtttgcctgttaagtccaccataacatcctcaatgtagaatgtccttgaatggatgatgttactgacttcttttcttcacaaccatctctcctctctttcttttctttttttttttttgagatggacttttgctctgttgcccaagctggagtgcagtggcacaatcttggctcacttcagtctctgcctcctgggttcaagcaattctcctgcctcagcctcccgagtagctgggattacaggtgtgcgtcaccatgcccggctaattttcttatttttagtagagatggggtttcaccatgttggccaggctggtctcgaactcctgacctcaggtgttccacccaccttggccttccaaagtgctaggattacaggcgtgagccacagcacgcagcccctctctctctttagactattaatagttgggtcattttctattactagtattttcactgctaggtccattttgttattatttggggtctcagtatggactgtttcttggatctggtagaatttgaatggtgtacgttatcatgaatactgaattacctgagcctttccctgcagatttcctgtactatacaaggaaaagtgtaatgtagtggttaagagcatggactctagactgtgattgccaggatttgaatcccagctccttcaattacatgctagttgttttggacacattatttaacctctctttgcttcagtttcctaatctatgtaataggaaggataatagtagtatctacttcataggtatctgcctcggagttaatacacagaaagcaattaaaacagtgcctggtgcatgttaagcctcacagtatatttgttattattgttattattattttcttcactctccagcagtggccttgagctacccaaaaggttatgtaatttaatcttccattcaattgaggaaggagctctgttgtaacagtcccgggtggcgttatccagctctgctgtggcacagccgtggatgaacagtttcttccttgtgagccagctccccaccacctgtaatgctcagtttttagtgccagctttgtcttctggacctgcacagtgtaaggcttttccttcttcttgtttggaggtagctccagcattgctcactgagtattccctgtcctgaagcctgtaattgtggggtttctgtgaggtttggccagaggcttcttgagggatgtggccaggtgagtttcgaaggtcgagattagtgccgttgaccttctgcagtgccctgcctggccccacaccagctgacacttatctaggactaaaaggatggttataataaaacaccgatacaggtaagagctatggaaaacaaaacttatcattttcctggtccttatctcctaaagcatttattatttcatgaacactttgaaaagagagtgctttttgagcttggggtaccgttgaaactgagtggacctgactactatggcagtgcttaaaatcagtttcttctttagtccctcccacaatgctctttgggtttcgtttctggaatatgaattgccaaaattacttgaactgtctgatggaggattgtaagctcaaaaaggaagtgttggctccccattaatacaccaacaccatctgatagacacaaactttctttttacccagcataattgggcaaggtcaggactccctcggacatggtttggggtctttgttgtagggaaataagttctttgggagaaatgattactctcagttatttcctagcctatcaggacctggaaagaccccaaattttgagggtggggccttttggagagtgccaggtttcaccaactatgtgcacgtggttctatgtagacctgtccattgatcttggagcctattcttagcatcataggtgacaaggggccatgttgcctgcctgtagagatggcaattgtgggcaggagttaactctaaggctgcgaatattctgtaccttctttccttattcttataagaggcaagtgatacatcttagagaaggtagaagtgtgtgtgggggaaggggtttattgtgagggtgggggtggggagaaaaggaggaacaactgtaaaaaatgttaatttattaatcactgaatatacagcagttcatctgaaatgctgttgctatgccaacaccctgggagtttattttcttaatccaagagaggagctctcagtcccctgctcccctgctgtgtcatttgaatttgctgctgccaccgctgccaccatggtatctgttttaaaaagtggggggcgaggggggagggaggggaaccaggctaaaccaccaaagcagtcaaatgcaaagcagtaagaggcctttctcagtgcgacttagtaaaaatgacacaaattaatatactctacttaaaccagaccaagattaatggttctctttcagtgcagcttagcccaactgtcactcgacaggcgtttgtcggacaaaatcaacactaatcaacatttattcgtctcttgcccttgggtctgaggcgcgcgcgggctgcgccattctcccgctcgtctcgccacgcttttcaccctccatccagcctcgccatatatcacccttcctcctgtgcctctcctcggacggatccacacactcagctatcagggtacattagaggcatgatagattttctgttttaatttacgtctattatattgcaacataacagattttgattccgtagagaccggtgtctcctatagccagactccttgggaggatttctgcattaacttattaaggttcgttaggatgcagcttcaaatagattcccttctctctggcttgttctctctctgtgtggcaagctcagtaaagatgtcttggtgtaccttattcacaagcacagctcattttctttagacttggcttcctgtgctggatcacatgaggctggctgggttcctcctttactttctgattggactttgatcagccaacaatgggcgttgcaagctccccagtccctgcctggtctgggtaaatgggccttgacaaatctggtggcctccagtcagtgggcaccccctcccaggctttagttctagcccccagcatctttctctctctctcttttttttttctccttttgatctcagttacagttagattttatttatattgcacctcaggtctacagagatggaaggggggaggaacacagtttcttgggttaaccaaggagaaggatgttgaaaggatgactgaaagagtgagtctgaacaaggctattttcatttctacatgaccatcttgaaggcatcttatttcagcttggaacaaggtgcatgagcccagcttgtttgttgcatgtgggaagtgtatatttttagttgccttgtagagtggctttccacctcatttatgaaattggctttttatttttatccttttctctttttccctttcaccagagttggaacgtgaagcacagtttctacttgctgacgtagtatttcctcttgatttttagtggggttggggtgttttatgagtactaaggtcacattgaactttggacacctagtcaccttgttgctggctgcagagaagagcttgagaaggagacagaaatcttctcgtcttctcatcatggctttgacaaatgcccagggagactgcaactttcttctcaacttggctgtaacactggagcccttggccacttagaaggcctgagtttttttatattttccaccaagctgctgattctaaactgtggtggggtttctttcatggccagaatggggagaaaccgtgggctgagttggggatgtgtggtttgtgtgtgtttatgtgtgatcactgaagtgtaggatatggtaggaggatggcttaggacttccattttggtttcttattacacagcaataaagtaaatggggcttagtataactttgcacttatagaaatgtagctcaatttaagaaacaaaactccgccaacaggagtgctcagtatcttcagcttgggaaactgacctcgttaattttaatgaggggaaaaattctccagctggggctgagaagaaaatgaaataccaatgaggttatcactttggatgatctcactgaattcagactatacttggaacgatgcttggagaattttctaaaatcctatggagagatttagaagaaaatgcatatgcccttgatagtattgacagactgctttccctgataggcagagccgaactctatatagtgcctcctaaaggggtcatttgaaaagttaacatattaaaaagttggaccaaagtaaaactgagagaaaaaatggattaacgtgattcttatgtgggtctagcgtgaaagcagcggggctggtcggacggtggctgaggccgttgactataagccaggggctcctgagttcaagtgcctactgggatgctaacttcctgtgggattttgggcatctgttttttatcgaccaaaggcaggaggtagggtgagggagtcctgttattcagtaggcagctatttgatttgctcaataagttgatgactttggccctgctgctgaggagtgacagattgtgaccaatgaggttaagatgactgtaggacaagtttgccctcagtgaggagaggcctgccaagttccactgacgtttggttggggaccacagaaagaaacatcaccattcaaggtatttggcccttattttgtcctagttcactaaatggcagatcctggggaggagattatttcaccagtggattcttcagaggtatgggggcagacagaacaggctttcttctccaaaagttcaagcttgctgactcaagcttcttactcatctctctggcatgtcactgcactcaggagaagatttgtgcaactatcaggtgcaaactcaagtatcaccaaagggatactttctgattaaatagagccatcgtgctctggggaccatctcaatatcagtggaatattgagggggtctattaatgtttatacgttccttcgaaattcagcctttttctttgaaagctgtaaggcagcagttaagggcactcgtactgctgctatggctgtgtgtgtatgtgatgggaaaggctggttgccaagcagcggagaatggacataatcatgctgcctagcaacagcggcagcgtggtcacttgcgcagatttctgcgcctcttcctgtttggtctgctggaaaatacagatggcttctatgggtcgctctctgccctagccatagtgagaggtaggaaaacattatgaaccagggtggaaaaatacacaagtgcatgttttaaagtgattcgtttccaaactgcctagggctgagcagggattcttacatagcattcctcagtttcccctttgaagatattgtgcactggcacgttgacttgtaagcaggaagaggaatctttgaaaagtgctaggcccctctgggtgctgcctctactgagcccgagcctttactctgcatgtgtgaatataaagccaccagttttctgataaagacacacacatacactcacacacactcacaccatgggtgaaaacgacaagtggagcagagcgtgactactgattgttctttgaggccggaggaacaaagcagtcaggagcgataaaggcaggtgatccctgctggtttgccctttctcccagctctgaccgtcaccgtcacacatgacattcttgaatgaggtcacctgctcactacagattctaaaaggggcttgcttggcaaagacctccagggtcagagtgccggcctttactgtttttggcagttgtgtgcatggaacattggaagcgtttggaacggaatgcttaaggaagatattatttggcagcaagaaaaagggagtgtgcagactccccctacccctcctgggatgagtaggtactgcctgcccgttttttctctacaggagttgaatagtagccagagtacaggcttggcatcagaaggccttagttcaatccttatctcttctacctaccagcagtgtggctttatgcaagctcttgttcatctgaaccttaccgctcttgtctgtaagggatagcaatatcggttttacagagtgggctgaaaggttaaaagaggcgctagttctttttggcatgcagcaagtataaagtaattgttgctgttcacctcctctccatgattaaagagtaggaagttgggaaaagaaggtgagcactgcagctaccttgttgattccaaacttcagtgtcttggtttttgtcttccttcttagcctcctaaatgaagagcctttatttccttctgtttagattagaaaagatgagagatctctctccttttgatgctgggtgcctggatggtattaattgattttagtgatttcttaatccatacagaatcagttaggatggtttgctcccatcttatggatgatgagacagtagtacagagcagtgggatgatttgtttggaaccctggagaccattaattccaagatccaaatcctatggcctgtgctcattttggcagcacatatgctaaagttgcaatgatacagagaagattggtgtggcccctaggcaaggatgacatgcgaagtggtgaagtgttccttatttatttatttattaaaacagggtcttgctctgtcactcaggctggagtgcagtggcatgaccatggctctctgcagccttgacttcctgggcttaagcgatcctcccacctcagcctccctgttagctgggactataggcatgcaccaccatgcccagcaaattttttctattttttgtagagatgaggtcttactatgttgcctaggctagtctcaaattcctgggctcaagtgatcctcctaccttgcctctcaaaatgttgggattacagatataaggcactgtacccagctgtgttctatattaaaaaaaaaaagaaatcctatggcctgatggtatagacgaagcccctgccaaagccagaggggctggagtaggtagaaagccgccaaggagtctgagcgttctaggtattgacaagacttgaattttagacttcaaaattgtgacatcagtgaatgttccccaaacagatcgcagcctggctcctggaggtctggatgtgctaggtgggtcagtagggttggaagagggcccttgcatcttttttgctctgtttacatttgtatgtctgctagtatacagagtagctaagggatccaaatgggggaaggccttgggttctaaactggcctttcatccaagtcctgctaagagctcttgttcctcagtttccccggctagaatgatgaaaacattgacctatttctcagaacaaggtaggtcaggggtttggaattacttatctggactactgcataagtgctccactcagcagattgctcctggtgcaacacacatactgggaaacgatgtgatgacactagcacaaaggacagtttatagttattttctgtggttcctcgttttttggtgttttttttttgtgtttttttttttttttttagacgaaattttgctctgttgcccaggctggagtgcagtggcacgatctcagctcactgcaacctctgcctcccagggtcaaacaattctcatgcctcagcctcctgagtagctgggattacagatgcccaccaccatgcctggctgatttttttgtattttagtagagacggggtttcaccatgttgcccaggctggtctccaactcctgagctcaggcaatccgcctgtcttggcctcccaaagtgctaggattacaggcatgagccactgcagcggccggttccttgtgtcttaaagcaaacacaggcacagtattctgggcaaaccagatgttaatagcttgacctctctgtcaaaggaggacttggttgcttaagacccttaaagctgtcaaagttatagcttctccaggatactatcatcctcacccatttcttattctctttgcagggagagatcatctctcaaaaagctcccatcagagcaaccattctgggactttgagcagaatgcttaaggcagtggttctaaaattccacaccacctgttcttccagttgtgtcctctctgagctgcctctgacggtcacattccatggccatgtgccacagcagacttgtgatactgattttagtgttgtccttggccattgggggaagggaggaaggagagagaagagaaggggagagaagaagagaaatgggagtggggtccattcatccatctctcttgtcattaggggcccagcagttcccactatggtacctaggaaactagcttggacctggaggccatccagtgacctagtctgggccagtaaagccaccaggccattttcctgcttcggacatgctttctcagctgccctcccccttagctaaggctgaaatgactcatcttcccgtgccctagttccacggggtttcatctctgtgactcgggacagaggccttggttgccaccaaaggcagcttatggtgtagcttcaggtctggcctgactcagtggccttccctcagctattcactacagaggcagttaatgaagaagacacaagggtagcaggcctgagggataacttcaaggctaacgtgtcttttttccagtacttactcttcttttgaattttaagaattccagattttattctaagtcagagaatactgtgagaaaggattttattgtatccactctctccaaatggtgtgaacatctggatttgcatccttcccatgacagatatcacaaattgggttgggttttgcatgctgaggatgatttttggtattcagctaacacccttcctttaaggaagttagaacacttgataaattttaagcttttgatcctcagtagtacccctggaaaattaaggtccagtgaggtaaattgtcttgattaattatatgacatgcactgctttttggtggctcttttgttgtgttttgttttttctttctccttcattttgttaaaatgaattatgtgaatgtccaggttagcagtgttctattttcataggataagccccatctctagtactgtttatttccattgtgcctatttttcagggaactctgtgcatttccacatttccatcaccagctctaagaaggtacacctgcagtttgttgtgaccccgtttcagaacggacagaaccaagtgcaggcttactctatttggtagagactgagtcccagcaagtagaagtgtcttgccaaggggatgcaattatgaataggaaatggaactaaaaatagaacctaggtatgaccccagatatttgaccactctcaccaacatgatttctccttttggtctcagaccaggacattcaaggcatctctccattttcatatggagaagcatccaactatgtctcaatggttgattaggagaccatatccttcaggagtcatgttgaaacttgtcagggtagttcctaaggtcctgaggcctaggatagtactgtatcctggccccatgaaatctgtggtagatggtaagtgttcagtatgaatttatttatttggttaggtgttttttatcatggtgaatacagttcctttaatatcagcaaggacttagtgaacatgtgctctttgcctcacagaaaatagaaaatgagatattagaaggaaatagaacaaaaactatttgccttcaaggagctcacagtctagttctggagactggacataagcagtctctgctctctgcttggactggtgtcactgtgatcattctaaggtaacgagccaccttttattcttttacccagcccagttgtttcagatgaaaggatagagaagctggcgtctgctgtgatggagttgatgttttattttaagataaagtatagaagcaactgattgatggattataaactgggaggtccaggataaagcttcattctgagggcatcagtatatttcactgggagcctcctgggcattaattctgccgttaattttgttattagaaacctagccaaacaaagggaggtggcgaagcttgaggctggtttaaccttgatgaaacagtgatttcaccaaggatgatgttgccccatccatcttcatccatcaaggcactgctgaaatatgctaatgaagcccaaagataggagcacagagcagttaaatggggcgttgcagacgctctccctacccccgtgacagggtgatgccatttactctccagatttagtataggaaagagagcaatgctgacgtggtgtcgtggtggaagatagaatggaggctccacctaataaaaagaaagggcaaagttcagggtatatattctagaagaagatgggaaaacttggtttttggtgaaggggttggttttcttaattctctttggctcactttctagccagtccacacaagaaccagatatgtggcatactgcagatagggcaacatttttaagttccagaatgtgacctcccaccatgtgccaaagcaagttatttgttaccatgtcagtctgcagcactgtttgtttccaatggtacatgagctaataccttggctttatttatttatttatttaagttacaaccttttggatacttatgacatgctgggcatactactgaattattttatatgaattaatctaatcagattcttacaaatagccaacgaagaagcaaagttatcacatatattttatagatgaagtttgagaggctaaattcatgtccaaaattatgtaaccagtaagtggcatggttggggtttaaactcatgtctacctgactccaaagcccttgtacaaaatcactgtggtctgaagactcttatgtaggttatagctgagaatccctgataaccattgggagcagcttgactcacatatttattgcttgtatattctttgggttcagtttaactttaactttggcattcccttcacaattctttcttttgtaaatagactataagctctctgaggtcagcagccaagccctttctctaatctcctaaatgtcgatgatgtccctagtttctatgtggagtgtttacttttggcatcatgcttctaatatagggttaaaaaaggctggccagctgctttctggttttcatttcatacattagatgaaagccgtgggggattttacttgtctttacaagttaattctacaggattcacagttaaatttctgtttctttgaatttattggtggatccacttttgtttcctactagtacattacctatctagtctatatccaactgtacagaaaaaagtaaaccgcaaatgaaattttattattatgtattaaacagcatctttggagcagtctatattaggaggtgtgtgtcaaattctgctcatcttaggaccctagacagttcctctaagagagcctgccacccttcgcttacaaaatgcagaccctgagctaagaggtggtcttgggcaaatcaggcaaaacaattcctaaatctaaaacgtttatcagcttttgtttttttttttcctaaatggagataaagttggaagttaaaagcaaaaaagaaggatggattaaaaaatatttaaataagatgccaagtaacatgaattgcctgaaatagactgtttcaggataaaaactgtatcttggccttaatgtgtcttgtgccatttattaaatcagttctgaactttggggactccagactgttattaaagagttaataaccaaaggcttcaacgtccaggatgttgtgtgggtcagtgtatcttgccaagaggtaacatcagccagtggaatcagttgggctctccgtctggcagatctgtctctttcagctgctcctcctccagtttctagtcttggagttcatatacagtaaatctttctcttaataaagccgtttttcaaatctgactttggactagggactgctttttctccaaatgcaacagctgttaaacatggtgcattgggcacggtgtatatctctttgtttagttttgggtttttaatatgagcagagacataaaggagtgggaggactctatcgatttctttctacccatgagtcatccactgggtttggaaataaggcctccagcctcaaaaggcttctgggctccctgggcttctcacccttaaggatgaagcctattgtgccctaataaccagtacaggattcccccccttcttttggtgagatagaattgtagagctcaaggtgtccgccagcagaggccagaccttttggcccctatctgtcccatttacatggggaaaagcatttttgcccccttgctctctggtccttctgtcactgtctctgttcccaatgcactagggagcattaactccctgaaggggaaaaaagttcacaaaagaaatgaattatgcatatggaattcatttccttgatgaatagggaatctgaacaaactccatggctgtttgattttaaggcagaggagaaggggggcttagggctaaagagtatagtggggggtgatcaaaaagaacttggaacaagagaggtgggagaaaaaccatggcaggaggacttgggatggaaatattgaggacaaagtaaggggacctttgaaaatagttgagggcccattattcttgccaacacgtacacacagatatatacctcactcccgattaatgtgcaaatttgtccccagggaaattggaaatggtaatgagattatactgggcagaaatgacaacactaaggtgatgtgaccgtcctgaattaaagtttttcagtgattttttaactttcttcagtccaggttaacaatgggcgctttgaattttgaggcaggagttgtgtgataggtaaagaactgcattgagaagtggaagacttggatccaagcctcagaagacacagactgtgtgactgtgggcaagtcacctcatctttctgtctcagttatctcatctataagtggggattatggcaactgccctggggaaaaaattataagggccaaacaaaagtgcttttatgcataacacaagatgcgaatctgaagggattttatttttctctctgtgcctccttttcttgatggcattttggttattcagacctagtcttttcagcaagtcagaatttctttggagcagaagaatgaaggggaaattgattcaggagcagcatgctggttaaaggaacaaagaaacaagtgaaaaatcccattttaatcctcaccgcatctatgttatgaaaaccatttaaaataatcaatctgatgtttttggcaaatttaggtactgaatcagtagtggttactgcataactagtttgatcaacagtaggaaagcttgtcattgacagccacatacattatggaatcaactagagggtggtttttagagcttcccttgtaggctgactacctagaagaggcaacctctgacctggctgccaaagacctgtggatgcttctgatggggagatatggccaaaccgaccccttacttctaattgtgctccattattccttgtttctgaatgcaaaaaagacttggggacaccaagtcttcaggagagataataggtagaaagtcacacatacctgtgtacatttgttaggatatgtccctgctcgttgagaggagagagtttttttgatagttatggggtcttaaatccatttcaggattgagtagattgagcaggtccaactaccgccatgtctctttatttttctcaccacccaatttcagtacatgcagtttttcacagaggtgtgtttgctttacagcaaatcctttttaggggtcaggatgtgtagtggaatgccattgtatcctttaggactgcccaccgcaaacacatgctgtgcactcatacctttagtgtggtggcattcagtctggtctgcagggcatggccctcggaagagtgtggagatgtcccaggacagccttcctggtagtaaggggggcagccctacaggctcgggggtcccaccccaacttcaacccctgcacctttgtttcatggattttatttgcttgggtttgtgggaaagagtctgcttttaagtaacctttgaaacccagtggtgcagagaatagaccaatgcctagtatgaattatttatttgtttattaagattttcatggcaccttccctttcaaagctcaaggcactgaatgaactcttcaaactgatagcagttagcactaaaggttgaacaggggccgttggaggaggaaccactagggaggatgagaaaagagggaggaagagcagagagaagagcacggcagtccggaccccagagccaccactacagccaaaggaggaaaatcgtaaagactgcaggcttcccaggaaggaatccagccctgctgggaagttgttttgttatcagggaaagtcacttccttctgtcagcctcctccatgaaatcgaggtgacctagttgaccccctgggcccctcccaggtatgatcttttaagaagcctgaggagctttcctttttaggtgagcaggcctaacccttctgccaagttgttacggcaataaaaatcatcataaaattttttttaatgttatgcataaacctttcaataacaagtatatttggtacagagtggttttcaaccctggctgaacattaaaatcacctggggaacttttaaaaaatattactggtgcctgggatctaccctggaatgatgaaatcagaacatctgggggctggtgctgagcatctgtattttctcaaagcaccccagctttttttttttttttttgagacagagtcttgctcagtcgcccaggctggagtgcggtggcgcgatctcggctcactgcaaactccgcctcccgggttcatgccattctcctgcctcagcctcccgagtagctgggactacgggcgcccaccactacgcccggctaatttttttgtatttttagtagagacggggtttcaccgtattagccaggaaggtctcgatctcctgacctcgtgatctgcccatctcggtctcccaaagtgctgggattgcaggcgtgagccaccgtgcccagcccaccccagcttttgtgttatgcactggggttgtgaaatacccggggacctgggaaggctgacaataggaggtgagcttgagtgtgcccaaagaaaggcaaagaaaggcttattattaggggtgtgatttaagtgtttccaattaacagtggaggaaggaaacttaaaactgtactttgaagttaccaagctctaggttattcttatagtaagtgtagcccatttggcttgtgtaacttatttttcacatacttcaaggccaggaaacttcagaagtgtcacagcaagttctttggccacctcctcactagctggctcccactgaaagtgttagccacatgccagctaccgttgtagggaaatcacacttaggatattttacttgcacgcagcagagaggttgctgttatcctccccattttacagagaaggacatggaggcccagagaggctacataattttctctgggtcccaaaacctgtaaatagtagagaaggggatcaaacttgtttatcttactctaagctaccccactctttctactatacctaatgcctcttagaatgaccctggacttgttgatttgtcagctgcttgcccttggcgggagggcgtttggctttctttttcagataggagagaaaacatgagaggagaaatcagcttctgcagagattaccttagagattgagcaaggcagtgtaatgtaatgaaaacatgcaccagagcaggggcctctagccccaggggcaggcttgcaattagaactgggctaaaagaaagaaaattgtgggagggtccaaatgagtaatatgggaaacatgctttttgtttaactgtgatacctttggtatcacagttttgtgattgatgtgacttaggctgtttgcctctttcattccaagatgacacacctctgtggggttactttgtgttcattctggacctggatcattttcagggggtccatgctagaatgtactgcaatgtgggaacattggcctacagatctagttaggtcctctcccaccgccatgcgcttagtcacttcacctgctgccttccaaaacaaatgggctgtgtgtgtctccttcccttaacaaagtattctataatcatattttctagcttaaaacaaaattagtcttttagatgtaaaacacatctaaagcacttttattaatggatcgctttccttcagggattacagtgcttagtatgaggtgctgactcatctattttcatgccatatagggaaggaaagtgttaactattttcgaatgtagagaatacttttgttgggagtctctaaaccttaaacccaggacctgtttgacaaaactgtcatcctcccaaccccttgaaaagataatgccctaaatctatcagttttttccccccagtatgcgaaagtggctgttttctggtgttagttgttcctatgtgtggcttggagccatggccacttggcttcctagattgtgtcccatgaattcaagcataaggagctcccagtctgctgcacctggcctcccttgtccttcacatccctgcagcatactgtagcaaactttcaagttagctttttattgcattccaccccctgccagggagcaaacttaaactcatgcaactcaaaatgaccatgctgggtctgttctaagtttgaatttggaccttgatccagccttcacatactttctcttatgaattcctcttaatgctagttaataaaaatataatggctttcatgtcccttctcataataacattgccagctttgggggttctttgaaaactttgcttgagaagtccatggccaaaaaaaaacaaagatatttggctttaaaatatggtctttgcttaccaaactcctctctctgaggaagggagagaaagagttgaaggtttctgggaaaggggcatagaagcaactcttaactctggccatgtggatctgcagacaaaattagggcaaatgtagtgctacagatcccatccccgggcctcacattgtggccagccatatggagtcagatttggagactttttggagatggggaagccactggactcttaggcatctggtgtaaagagagactttttctttgctactttttttttttttttttgagatggagtcttgctcttttgcccaggctgcagggcactggcgtgatcttggcttactgcagcctccgcctcccaggttcaatagattctcctgcctcagcctcctgagtagctgggattacaggcacctgctaccatgcctgactagtttttgtatttttagtagagacagggtttgaccatattggccaggttggtcttggactcctgacaagtgatccgcccgcctcagactcccgaagtgctagggttacaggtgtgaaccaccatgcctaactatcgttgctactttctattggaagagaaggcagccctgatttagtctgtttacagtctgcattatgtggagaatagagagccatcatagtccctaaaactttccttgccagttaacccagcaggacaacctgtctttgtctcttgacaactgttaactgagaacagggcccttgctcctctaggtgtgcacattaaggactttgcacagtgtggatgtagctcatgctgctctgccgtctagtacatgctgcttgaattttcatcatcatcctccactccttccacctccaagaaaaaaaaaagcgtgcaggaagtagcatttcagatccttctccaccacctctgcttcccttctcccttcttttcctccttgcagcattccctttagtaccagggagggatggtggttgaaaatggggggaatgatgttgctcagaaaaaaaaaaaatcagcctagaccttaagaggtgaggggaaaggaaagaacacttcaagcatagcccagcccaggcatgtcagctcccaccccagcctccttgtacctcccatctctgaaggagggtgatgaattcggtttccaccaacattaaactgataaatgaaatttgtatgttaaaacaatgataatttaattgtattttatttccttctttcccatccacacttggatctcacccccctccccattacccacccttcagctttggggagggggtggtggaggctgtgcaggggagggggtggtggaggctgtgcagaggcgggggcattgcaagctgtcggtttgcattgtgcggacggggaaaggtctctacctggctcattttgtcccctttgcttaggctgtcactgctgacagtcctcatgtttatttcatctcgcgtggtggctgtctcgtttccctaccctccgatgtcattaacgcacagagagcgggccctgcagtgttgagcctaatgaattccgctgtggctgctctgctccccacctcgttaccaaagctcaaggtgtcaaattaaacccagcctagagagaaagagaaagtgcaggagagaagcaagagcaggggaagagggaggtgcagagaacacataaacaaccctccaaaaagaagaacagttgaaggtggggggagaagaaaggaggggaatgagacagagaggagcccacaaatgggtgactttcctcctgcgaccaaatccactttaagcatggtgacatccatgactcacagcaggacctaatgacctattcttccccgggtggggtttgtaccttggccttggctgcggtttgttgctttttcctcgttgtctggttgatttattttcatggtttatgcagattgggcacctcgcaaagcagacagagcaagtaagaggagtcagagcttatggagggagggtgtgtgtgtgtgtgtgtgtgtgtgtgtgtgtgtgtgtgtaaggaaaagtagaagccaaatgtgagctcttggtttggtggctctgatcagctgtggaaatctatgtttcaaaatggtagaaagaggaaatcatcacttttttttttttggagagggagtctctgtcaccaggctggagtgcagtggcacaatctcagctcactgcaatctccgtctcccaggttcaagccagtcttctgcctcagcctcccaagtagctgagattacaagcatgtaccaccacacccagctaatttttgtatttttagtagagacgggatttcaccatgttggccaggacggtctctatctcctgacctcgtataaatttaaataacccctgtgggggtactctagcagattttcctcccctcactccaccccaatttggaaaatagtgattcatttcatctcttttctatataaccttgtgtcatttacaaagcattttcctttatattattggcattttatatttggggcattttgttggagatgaccattaatagattcttcccattctacagatgggaaaaatgagggatagagatgttaacttacttgctcaaggtaatagaactagaaggtgagagaagagggttacatttcagatcctccctttccagaattcagtgtttttcccttataccactaaacttcctagatttttgtcaagaggtgggaggaagttaaaagataaataagcttgtgaattttaaaacttgaaaatttatatacagcaaaatagttagacctaaaatatacagtttgaagtgttttgacaagtaaatatactcatgtaaccaacacccctttatcaccctggaaagtttctttcagccccttttacttctcttaccacccgcacccccaccgccatagtttatttttgcctgtttaaacttttttttttttttcggacagagtctcactctgtcgctcaggctggagggcagtggtgcgaccttggcttgcttcaatctctacctcccgggttcaagtagttctgcctcagcctcctgagtagctgagattacaggtgtgcgccaccacacccggctaatttttgcattttttgtagagatggagttttgccatgttggccagggtggtcttgaactcctgacctcaagtgatctgcccgcctcagcctcccaaagtgctggcattagaggcgtgacccaccacacccagccttgtttaaactttgttagtagaattacacaacatgtgtacttttgtacccggcttttacttatcacactgtttcttgagatttatctgtgttattgcttgcatcagtacttcacccctccttattatcgagtggtattctattatgtgaatacaccacaatttttttatccagtctcacttgttttttttttttaaatctttttacaataatttagtatgtaagatacaatttttttataagcgttttagagcacatgggtgatggcctggctccctgaattcagtggcagggccgtggtgctgggcaagagggatgagtgaggggctgagcatggtgccttacacatgtaatactagcacttttggaggctggggtgggtggatcacttgaggtcaggagttcgagaccagcctggccaacgtggtgaaaccccgtctactaaaaaacaaaaattagccaggcgtggtggtaggcacctataatcccagctacttgggagactaaggcaggagcatcgcttgaaccggggaagcggaggttgcggtgagccaagatggtgccactgcactccagcctgggtaacagagtgaggagtgagctgaggcacagggcagacaaaagcctgtcatggccgcacctctcaaacctgggcccacaaacccatactttaaatggcttggaacttacttgtttctttgcttggggctcattgtctgcttcattgtccttggctatttataacaataggtgtgacaatagaacagcctgttccttctttggagttttctgtgttagttatttgattttaaaattctgctcctttttcccaagattaaaatggaattttgtttctgataaatttttaccattcttttccaaacagtagagtcaactcaaggatatcacaaatcgggactagaaattgctggcagatattccgtaaacacagtgcattgggggtagggtgtctagctctaatatttgcattttgtagatggggacaatatgaaaaactttgtcactccactaagatttttggcacttagaatggcaagaaaatccaggttcccttacttataatgtagtgcttttaccttgaaccaaaaaggtaggatgtgcgtgtgtatttccagggtctctatgatttgccatttgtattaacagaaaagaggcccagtctttggaactctggttagaggtgacatcatggcaaaacatcaggcctcaggtttcattgattttaaacttactatgtcgtgtgattatctcatcgctgatggcctttgtcattaaatccactgcttcagctgggttgaacacatttgaggaggaacaggatcaagaaggtttttgaaagatatggacaagtgatgtgagaaatactggaatttaaattctttccttctttttaaaactatccctggtgatatctgtactttctaaagagtcaaaatgggaagagaatggtctgagagtggagatttggtggcatcacatcagtagttctactttcttctccattcccacacacataaacttcatgaaaataaactcagttatgtagcatttaaggcctattcagaaaggattcagttgtagtcagtcaatggaagaaccaagatagttaaccaagtcttaagcatttctctattcattcagcagcatttatcgaactgggtataagaaatagataaagccagcctctgccatcaggagcttgtgattggggagtaatgtgtgatgtgatctgtattatcacagaggggagcacagcatgtgatgggaatggaagatgggctcctagcgtggccttcttgggtcaaggatggcacgctggattggataactcaggggaagaactgattttatggaaattatccaaaggagttattcattaatttagcatctctcttccccagtctctgatgtgtgttttttttttttttttatttttatttttttaagacggaatttcacttttgttgcccaggctggagtgcaatggtgcgatctcagctcactgcaacctccacctcctgggttcaagtgattctcctgcctcagcctcccaagtagctgggattacaggcatgcgccaccacgcctgtctaatgttgtacttttagtagagacggggtttctccatggtggtcagactggtctggaactctcgacctcaggtgatttgcccacctcagcctcccaaagtgctgggattataggagtgagccactgtgcccggcctctgaagtcttttttaaactgcctgtcttctacagagcaccatgctatgggagtgtggtctggctttgggagtagaaaagtccaatgttgagtacaacattgagatacatggctgttgggaccactcttaatcttccaaggatgaccaccatttcttgtagtggtttactgagacagtcaagacagtgtgaatatttctggtaatgttcagtgaaattttttcttgtgattgacttactgtttgtgtttgctgatctggaacttcagttgacctccttgactgcaatcatttgttttggttttgtgtgtgtgtttgcactgggctttagatttgtaaaacattgtatatagttaatgtgatgtagcctccctaaatctcagtgaataggattttacatggcatcaatatgcagtgaaactactatgattgtcatagtctaacatggtgtaaggacctgatgaagattttgtatgacaaatgaggctatggctgcctttgggattagtagatatatggaacaggaacaagaacaagaaggcatgtaggataggtattcaccataacatgaatagatggagattatatagacagttagccttcaattgcaggtggagaatggaattaatatggaacatttaaaaatattttagaaatgatatttttaaaagagagtcaaaataaaatgctttcatctgattatttgaccagaaattgggctgcttaatataatgaataattgttaggatctatcgatatggctactcagtggtaagaagtgccacataaatattggtctaatacatatataattatgtaactctagccaggtagctggattaaatatgggtaacagcaaaagcacttctgtcctgataaaagtctcagttacatttaaatacttaatataatcagctctttttcaagtaaacaataattcaggaggcaaatgttcagtacatctcatagaaattttttgtcttaatttgtttgcctgtacaatctgcattcttcttattaatttaatccatattttgaagtcagaaaagaattcatctcatttgagttagtttagatcaacatactgatattgctgaatagtttcacttccctgaaactaaacatatctattcctttcgtcttagacaaattatgaggggaaacctgtctgaaatttggctaacacatggtgtgcatttgatgccactggaggatttgctttgtcaatttaagattgagtgatggctatagaggaaagtgacggaaaaaaaaaaccttcttaatgtgaaatagaaagtataaaggacaataaaatgctaaaatgtacaggaaattcttgtaatatgactaataatgtatgagacttgtagagatcagttctgctacaggtattcttatgttatataaatgatattataatatcctattacatatattatattatcatactataccaagaatagataatatttttcatcaactggtgattcaagtgtgagtttatacatgggttgactgtggattgtatatatgataccaagcctgtgtaaaataaaacaaaaacccccttcaaactcccatatggagtatttgactaaagcaataatattaagataacatactctattccaaataaggatataatttgctgtttgataaagcaaaacaaaacaatggagtgtattggtactgttttccacagagtgggaagataagaacacatgtagagatgataaaatgtcattggctccaagagacaagcttccgaaatccatggtggttgaagaacatcaaagaggagcaattatttcagtcattagggcagttccacctgttctaattgaacatttttaggatgtagaagatgcatcatacattggtatctattcagaaggtggggacatctgctgtctgtcatgtatctgggagatgtttatctcaacaggaggcaataataatatggtaaaccaaacctaatattatcatgatgcattaaaactgggttaattgaagcaataaaatcaaagtaacagtaaatgcttatacaacatgttaagtaatatttacttcaatcttagaaatgaaatgataattttacattctagcagatgtatttcttgatacctgttctgagaggacagaaacaaggctcaaaattcatgcaagaggctaataacaacttagttgatagtaaaatatggagcattggatgtagagtgcattaaccttcttgtttaatctgagttgacctataagtgggcatattgttttttggggaatcgggagttttctcaagtagaaagaagccccacttttcctttgatagggtaccagtcaaggaaataaatgctcttttttctacctgagttagatttgcctttcatttgctcaccctgatctgtgtggctttattgaccactacagtttaagcccatgcaacctgcatgctgtgcaagaaagaaaggtgatggacagatagtcccagagttaaacttctggtgcctttgccactccatgtcttgccatcttatcatcatagtagctttgggtatggcctcctagcagcttcattgttatgcctgtgggcattcgtgtcccactgtcaggcagattctgggggactggggagccagaatgatgggtagcaggcaggtggtagatggggagacctaaagtccaaaagctagaccccttctctcttaactcataatggcattcagaagttgtaattatttcacaaataataaatgaggtacaaaaaaaaaaaaaaagaaagactggaatttaaaataaaagccaaatcaaccttacagcccatgcgaattctgcagccactgtttagctcaattgtaaaagtgaccctataccccaacaccagtaaagcaagtgctgccatttccaaaggttctcatcagcctgttgtggagctcaactgattgaaaactgctttttatctgctgtggtcgtagggatttctggcaatttcagttcttgcctttccaagaatgaccaaaataagtacagataattactagagataaaatattagagatctattaatacagataatggctgtgacatttcctcagcatcaaaagctgtggcactacagctttttctctggattgcagcttgatatccccgagtgtgtttgacactatataagtgtatacacagcatggtgtcacatggttcttagagtcaaaactgtttggcattccagcctgctacatatctacatatgaggttggtctttatgaccttggatgggctatttcacctctccaaccctcagattattaatctgtaaaattgggattttaatagttaccttataataataacagccaatatttattgagcatgtgcatgccagatactgttattaccactttacatatgttatctgttaccctgtgcactacaaccttttgaggtagaggctcttattatccccattttatagctgaggaaagaaaagacagagaggttgagtaacttgccctggtggatacagttattaaatgacagagccaggatttgatctcagactccatgatttccagtcgttgtccattcccattgtctcactaagactcaggaggaccagtggcaatcccacatattaacctcatagcacagtgtctgatgggtaggaggcactaagaaagggctgattcattcatcatctctttttccctacaatgaacaatgtcacatggacacagagagggaatatttctttccctgaattgttgggaattaggttcgttgttttaagctctagaaatcacatcctgagaatgtgcccagatttgcagatatacatcgattcacatctcagctggagagggtgaaataccatttggaattctgcatccagatcttctgagggaaaagggggtaaatcaaaggcatccacagatcttttcctttttagttacagacctggaaaaggcatttttctgccacttcctcattgggaatgtaactctcctccctctatattaacaaagctgtagcatatgtttcccttgtgttcttaaatcaccttacatagcaccaaacatgtgctgtacatccaaaaaatggttgttgaatcaagtggagttctttgagtgagcaagggaaagttgggatttgtaccgaggaagcagcaggtgagtttgggaaggacatctttttgctatgtgagtggacacctccattggcttgggtggctgcagaacctgcctcccccttcacacatcctcccttgttccctctccctggcagcttaagcaagagcactaagcttggccagttggaacgccagccatgcccagtcttgtgttttgagggagctaagcagagagacaggattactacagatgcctcagaggtagcagcagaatcgagggtggtggcagtggtggggataagtccccaaagccagcagtaccagagtctgtctcctaacaggcttcctctggcagcaccttggttgtattctcagctgtctgtgcttatttttctgagcttgattctccaggtttcctgttgactctgagaggcactgcctatctgtccaataaattcctttcctgggtaggtgagccagagtccacttctgtagtttgcaaccaaaaaccttgacaggtagaagttagggaaaaatcacatgctgtttctaaaactactcaccaaaggaaaatgaggaggggttgggggcaatattctacagggtagatgatgataaggacaaggttttctgagtgagccaagtatttctggtagaaaacaaggtttaagcaaactggagaaggattgcacctggctttgaaatataagggaatgttgtctaaacctgaaatacgggtttgggctttgaatggagccctttggggaccttgcctatgtgggacatgctggggcctggagctttggggaacttacactgggtttgaaaagcacctgccagggagctgaggcgtctcagctgcagctgacatggcagtgctgagacccaaaacacctgtgtggtaagactggcgaaagatcaaggacactttacagacctcctcttgggataaagtgtaggacctgtgccattgcataaattccttttatgttaacttgctccttgtcaccctatcagctagattaaaaccacagtcagttgtagtaacatcagcagagggagaaggaagtggttttgtctagaggtcacacttagtggttatactgacgcctgctgccattgcttgcttttcttggttgacagaacagagcagcttttatgtacatcatccttgactacagctcttcagtgcctttgctagtcattgaggttagaaaaccaaacataggatgattttttttaaagtatattatttcttcttcattttaacaataatatagattgtggtctgtgcctacaaataacatatcagttgttcagactactaattctctttctaggattcatatcctctcccctcacaaattctgctcagcactaagttacctaccttactggtggagccaagcaccttgatgtatacctgtactattctggtacaggaggaaacccagagaattgccagctgatcacagctgaagccaacagctgatcacatctgaaggcaagcatactgcttgttggtgtgcctgttcaccttatttaagtaaacacagactggaagcagctgagaggagaagacttttactatgtttttctctgtctaccaactcttctttatttgactgtgaattcttcagagattgaacccttgcatttcttatcctttagttcttcagcatctatagtaatggtggggaaggaatactgatgttttgaacacctgtgaatgaatccagccgagggcctctctcccatgggtgtgtctgaaggacatgccatctggcatgagggataacattaccaatggttcatgtcaaagaagcctctacatcctcagggaaagccctgatattgtggtctagggatcaccagcaatttcactgtaagccagttttttttttttttttttttgagatggagtctgactctgtcgcccaggctggagtgcaatggtatgatcttggctcactgcaacctccacctcccgggttcaaacaattctcctgcctcagcctcccgagtagctgggattacaggcctccaccaccatgcctggcaaatttttgtatttttagtagagacggggtttcaccatgttggccaggctgatctcgaaaccctgacctcaggtgatccacccaccttggcttcccaaagtgctgggattacaggcgtgagccactgtgcccagccataagccagtttcttatattgacctttgtaattttatttttggtattagttaatgtgtacataggcgttatcacctcattggaagttaaaagaaaagtagtgctagctttttaattttttaaaaatttatttcatgttttcaagcagggataggttgtagagtaaaaacaggaaaaaaaggactaaagacctaaaaatacactttcatggagggcatcaattgcctaaatgttttcttcttgagtactttccaaatcctaacaaatcaattcttcccagacttgaagagccctcctttaaatacctctttagaccagatgcaggtgcagtggctcaagtctgtaatcccaacactttgggaggcctaggtgggcaggtcacctgaggtcaggggtttgagaccagcctggccaacatggcaaatccctgtctctactaaaaatacaaaaattagccgggtgtggtggtgcacacctgtaaccccagttactcgggaggctgaggcaggagaattgccagaatctggggagtggaggttgcagtgggccaagatctcgccactgcacttcagcctgggcaacagatcaagactctgtctcaaacaaacaaacaaaaacttctttagtctgtttttggaaatttccatctgaccagactctgggccttctaggagacagggtgtaggcagagttaataggatttttgcagaataccttgaagctgtgggaagccccagtgcatcctttgcattgcaaccagtaccaagccgactatgcatttcctcagtcagttgtgatggtctgatgtcaattcctgttggttcagggtccgaggagccttcttcagcttgttccagataagcctgaagcctccctgaatctgtgatcccctgtaggattcaggagtgtgagctttgagcattctgtggatcaaggcctcttgcacagcctggtggcagtgagatgcctttgttcatgctcaagcacttgtctttcccgtaattgcctagagtttggtagcttcgttgttacagtcaccgtcaccttgtactgtgaaggtttatcattctatgtcattatgtgcatgcatgtgaacatgtgtgaacatttattttttttcttgtagtgatggttaatatgcagaactttgatcagatattgtttttcttactcctgaactagaactaccttcttcatttattattttattattgtgagggttattataaagaactacaactctaaaatacaaatgttttgatgatatcatagaaatacattggtgctaacatcagcacaactagtgaaaatatgtcttgcccagctgtgtaactttcaaatagtttcccagaagccatagccttaagcatgtcagtcaaaggaatgacttaagcaaatggaagcgtgcctacctttctgcctgccttcttgcctgcctgccttccttcctgccttccttcctgtcttccttcctgccttccttcctgccttcctgccttcctgccttccttccttcctgccttcctgcctgcctgcctgcctgcctgcctgcctgccttcctacctgcctgccttcctgccttcctctctctctctctctcttcttccctttcctccttccttttttccttccatcctttatttagagatttggtcagagtagaaagtatcttagtaggattgcttctccctatggtacaacatgatgtagtgtgataatacattactgttcatgatacgtagaacctgttcaacattacgtgctttgggctctggcccatagcttgcctgatctgggacctgaacgtaaagatacttatcatcgacatgctgtgtgttctttaaaagtaaagctatatcaaagatacttatatttaatgagatgattgcacctgtctgtcattgcaattaaaacatttatgagatcatcaaacacctttttgagtgctcctcaatgtattgctcttggtatgatatcctatccatcatagtcctatgcaaataattatattagcaaagtatgttgaagtgtgttggcgccttaaataaaatatcaattgccaggtacgttaggggtgaaccccaggccaactttcatagtagagctatgactaatcagatggtgtttaagttaataactcttcccagaagccaagtattaaagaaagtgaaagatggtggtcctttgtgtgggaatccaagcacctgctgaatggtgcctgattattttgtcagggggtttcaaacagtctccccatttgtgacaggtaaatcctgaaagagcaaaaaggctggattgtcagtcagagactgagcagccactttgcatttggtgagtttgttgaattacctaatattaatctacataaccaagggaagtgtctgtctgttcaagagaaggacatagatgtctcaactgaaacaggttaactgaggtcatggagttgagaaagtctgctttttcctcatcttcatataatgaagtctttccttctcattatgatctgacattaaccagcaggcggaccatgtctaggtgtcttgaccttttgaggttatgtggcttcctctgtaagatgagggagttttttagttggtgtccctctagtcatatgtctgtgctgcctttgacaactggtgttggccgtaccaaaactgtcaccacaattgggaagctgtgggaagccccggtacatcctttgtgttgccgccagtaccaagccaactctggattcccacagtcaggtgtgaccaaaccaaaactgaccataccaaaactagtcacaatatcaactggcacaatgtattagagtttttggcttgagttgaactcctatcatatgagacaagtcctggcatcattctgcattattctggtcgtgatggtatgtattagtctgttttcacactgctgataaagacatacccaagaccggacaaattccaaaggaaagaggcttaatgacttacagttccacatggctggggaggcctcacaatcatggcggaaggcaaggaggagcaagtcatatcttatgtggatggcagcaggcaaaaaaagagattgggcaggggaactccccgttgtaatactgtcagatctcgtgagacttatttgctatcaagagaacaacgtgggaaagacctgccccatgattcaattacctcccactgagtccctcccacaatacatgggaattcaagatgagatttggatggggacacagccaaaccatatcatagtacaagcttggaatctgtgttgcagggtcttagaaaagagaccattttgtaaaagagggaaaaggaggactgtgaaccttcttcagtggagtttgaattctgtaataaattctgtgaatagtttagctacaatattcctgtctaaatgggaaagactagatgatctcttgtacattggcaacatagctgtatcggtcagaaattttagttgtgctaaaaataattcagtctggctacttaacataaaataaaaaagtattaaacattttaagaaacttatttaaaaatttattaaaattttcagattttattttattttattgatttactttttgagtcagagtctcattctgtcatccaggctggagtgcagtgttgcgatctcagctcactgtaacctctacctcccaggtttaagtgatcctcccacctcagaccccagagtagctggaattacaggcatgcgccactatgcctggctaatttttttgtatttttaatagagacagcgtttcaccatgttggccaggctggtctcaaactcctgacctcgagtgatccacccgccttggccttccaaagtgctgggattacaggtgtgagccactgaacccagcctaatttttcagattaaaaaaacaaagggacactggttagttcatagaatgtctggagggcctggcagcctgtgtttgtagcacccagctaccctatggggctgtctccactggaaacacctctacctctgcttctagcagccaggacactcaggacctaacatcaggaatgtggccgcttccacccctaaacaactacatagcttgtcatcgtggatggcaaaagattgagtcccctaaattaaactgctgctttttagaatccaagtgctggtgaggcttcatcagattcatgggacccattttatctgcttgtacctagttgcaagggagtctagggttttaagttttctggcttggccttgagaagatgggacttgtaaagtagggaattatcaaaattgtcgtgccttaaagatattaggcagccataaaattttcggtatgggattctcagtgttgggcaactccaggagggaatggtatgcacgacaagatggagttgaagagatacgggatgtgactcctgggtaccgttcactattcccacgaatccctcacctcccagaggatgtccccatttgcaatactcttggggtgactgtctaacatagtggtctctcctgggggtttctcaactgccacttggcgtctcagcccttcttccccaaagcctcaaaagctagatggaaaggaaagaggctctgttcatatctgcattcagtggacatattacaaatgctaacaaaaggcttaagtccattattattattattcttatttgttgtttttgtatataaatatgcctaaggtttcaaagatccagtgatgtatttagctaatgcttatgttgttataatgtactagggtgttcattctcagattggtctgagtaagaaaaatgaaataatgatagctgctctaagaagcctgataacagattctggctgatggagcaaatattctgctgcttgataaactcatagaactgtggggcctctgttattgctattttagtaatggaaatgtccctatactagtttccaagaatatcagtaaataacacctatgggcctaggagaggtgctgaagcaaatgtggaggatgagggacgggaaggagaggattcctgggagttactgaatttttaaattggaaagggttttagagactaagccatttgcctaaaggaaaaaaagtagtaaaaataaataataatttactacttgctaccttctactgagtcctaattatgtgctgaggtttttattagatcgtctcattgaatcttcacagaaccctttaaggcaggcaatgattctccgtttctcagatacctagactgaggcttagagatgttatggaaccctctttgtcacagagtgtgttctgtatagagctgagatttgaacccgaatttgctgtgaagcaccaagatacaccctaagaatagagcctgacatcgtgtctgtcttaggatggttctgcccattctagttaattgctttgaaaacttcattgctcaccctacccagactgacactgcttctgaaggttttttcaggccaactgctccatcttcatgaaccttggccttgtgaccttccctttttcttactgatttcatctaatcttgcactgggcgtgtatttagttcctgtctttgcatggcaatgagctaagtaaaaaacaatgcaaggacctttttagctaagggacttgccttgtagaagtttataatcagaaatatatatacacacaaatatataatataatctatataatataatgtatataacatgtattttatataacatatgtataatatgtgtgtgtgtgtgtgtgtgtatatatgtatagctctgtctatatatatacaggcagagcaataacttcgaccctggcagaactacagagaagcagtggacatttgggtcaagaccagaagccttagattatagtccctgggtagctgcttcagcttcaagacatcacatggacccctgtcataatttaaatagtttcacagtagatcattggcattcaaagatttaatattcttggtttcacctattaagaaatggccacaaatctacaggatgtaatcagctgtaattttgccgagacaacgcatttcaaatacttgtgcaggagtgagccgtttagctagtgagagagcccagccagctaccagcagccccatcttgatgagtgagactctcagatgtggggattcccagaggtctcaggacaacaaggctcgaggtagatgcagttcacacttcctgtattgttgtttcctagcctttcctagtctcaggtgttgcaggcagtgagctacgggaggtcagcaggctgtcctggctgtacacaaatggctgcccccttctcccacttctccctccagagtgggtggagtgctatttgcagatctctccctgattgatagggcttgtctttagaaatggagtgattgatgtccatttctacatgcctttcctaggtgaattcctcctttacgtttggtcaggaactatgtcataccaccctcctgtcatctgttcccaacagtcaggccttggctacatggtcctgaacttgtcttttcagcactctgtggaatgagcataaagtcacacccaagcgaccggtctttcctaggaagacctttgtttacctaagcaatttgtaagggatgggtatattatgcttaatgtttccccaccagacccgattgtgtcttgatttggggcggtggttcgactttgagggtcagactttactcctgtagcaaaagttggacaaatgtatacaaattctctcacctctcacacgccaacatcttcctccacccaccccacctccaccatgacttaggatcacctgagagagaaatacaaggtctcccagccagggccctgctgggctgtctcctgaggtgatctttagataggtgtcgataacagggagcctccgagccctgccaaaatcacttggccacagccccaagataatatttgaagttcttgtgctcaagagtgtcaaagtgtaacatactcttcccctttcgccttaccttccccaggcgcagccaacacttgacatctttttatcagatgagcttggcactgccaggaccggctcctcgcgccaatgtggcagcagccacagcccctcagcttgttagactgaaagaatgtgccgttttaattaatgatatgtaaatatccttgaatgggccgcatttgcatattaagagagatttgcggaatctgcggagtaatatattttaattaaggattaattaaaaataatgggaatttcatttcgcctggcagaatccgtttagattttagcacacgtctgcttgggagtctggtaggaagactgtgtgttacgattcccgcagatgagagaggcactcctgtgtttatcatcttggagccccactctggggagcaaagggaatataaagggggtaacattttcctcttacctcccccatcacccacccctcttcttccctcctctttgtgattttagggctgttttggtattctttatggtaaagtaagtaaatggctctgagacacggaacactagttgtgttggcaattatgttaatgggatgctattaggctatgattctatatgagcaattggggagaagaaatgccttactgagagagaatgatacaacagacgtctgtcttattgatatagctccagtggtgctttctgcataattacactcgtccactttcttgaggttggggagaaaccgctgcactgggaattaagagcaagggattgggataaggggcgccctctcccaaatccacagaggacatggggtgggggcacattcttctagcagatgtgggtgttgcaggtgagcaaaacttgtttcacagaaattttattctcttcttttccttctacttccaggaagtagtcttaagtatgggctgggttctagctccaatagtcctctccagaagtagaattttttagaatgtacacactgcctctctgaccttctgtctctgggcacaccctacttccctttcctgggttcatgcaacaaatcctcatactcctagggagttcactattctgttcttagccctaaacacatgttcacagccttctaatatttcctgctacccaattggcctttcctttgtgtatatccatgttgggcattgtcacagaccgtcatgaagtgtctattattgctttactttctgtttctcccttcaagtcagttggttcttgttttgtgtatttaggtgctctgatgttgggtgcatatatatttctgattgctatattgtcttgatgaattatcattgaccctcatggtctgggcttctgtaagccctttccacccttccaattccaaagctgccagcagtatcaagatttgactaccagctcacaatatttcctcctgcacatctggctgctatgagagtgtgagagtactaagccataggcagagtccatgaggagtgggactctgccctcaagtgaccagaggcgcctcctgagggcttccaccatggaaaaggaatatttggtttcttccctttacaccctcagggaggtccaggggaaactgcctaggacctctctaagagctgatggcctgaggcttgcatcttttgttttgatgactgataggctgaagaagtgctggggaggaacctggaggccagggattttgcaattatgcttccccactcaatccctttccaggagaataccctggtgggaaatttcagcacttccactggaagccttaactcagttttccccttactctcattaaaaaatatgtatgtcagctatccctccttcctttccaccccgtgtgactcctgtatttatggatttaggggaaatccacctataggcactgctgctacggcctttccttgcagacattctgacatctcaatagccagctgactgaaggcctgtggggtcaggtttgagaggtagatggggagcaggcaagagagcatttgaagctgaatgtatcaagactgccaagactaagagagagaaaggggcttttagaggcataaagcaactctggggcagaaaaatggagtactgagaatagcagagagaggaaaatagcagagagaggaaaaagaaagtgatagggcaaggcttcttgtaaaccaaggcctggatgccgttaagattgaggggacagtgaacaaagcattggggggaggatcagaaggggtgttttctttctgcctgtgtccctgcgcccgtgtgcactttgcaaaggcagcagtgccttatctaatgcaaatggagaaaatgcagtttctggtaagtgttccctaataaataacatcaagtcttcttccctatcagccagtgacatcccgcatttctcttccccatgcaccagcccaagacatttaatgatgtggtgctccttatgggatgtgaggtccatgctaatgtctccactcacaaaatggtgggaacagatttcagctcgattcagttattctgcaccgacagaaatcacaaaacaaatatatatgtgtttttcaagtgctaagatagccctttttttttttttaaagtcagagaagttactcttggtttttgttttgtttttccttttcattatatagaaatttgtccagggctagttcttggttgctggaggatttcattaatgaaatgaagtaaaaataatcaatttcagatgtttccagtgttggtggtaatggtctctctaacaattctgattagccgtgtgaggtggaatttttcttttaaatgactgcacgttgacattaaagatgggcaaactttgtgtgtgagtgcatgcatgtgcatacactcgcctgccagtgcatgtgcctgcctggagctgggtgtgaggcttgtgttcattcttgccctttcccttgctgttttaccgcctgcttcatctttagtttcccctgtcgttaccctttccctccatcagtatgatttctgaaaggctgttctctgtcctttgctctctcctcctcataagtctaggccatttctgggaacatgtgtgtaaggctgattttttctggggggcagggagtggtaagtggtgggggaggttaagagtaagcaggttaaatctgcattcaaatcaatagaaagcctctgcgcctttggaatgagggttttgtgtgagtgtgggtgtctgagtcagtggtatatattatcctggtatctgccagcccaactgggagctcatcagacagagcctgcttgcccatatgccttaccttccctttcttctccagaccctcttgtactttcaaagaatgaataaattaaattgaagagagtccaccgtggattcttcattattaatttgtttctttttatttatttttcatgcatttttcttactctggttgtttttctttctgtttttttttttttccccttttattcccctgttgacacaccacatatacagccctcccttctctctctgtgaacagctctcttccctgtatacgaacagtcatggagagtgatttctctgcagcgtgtctgtctctacatagatactcatgggtgtaaacacaccagagagggccactgcatgtgtttattgttgtactttttccctttgataagctgtcatcggtgggcactgctcaggggacttgatcccagtaatctctcgaccccatggaagacatttaacacccttccagaccctgtgctctgcctctgtctctgaacctttcactctcctttaatgagaatttctcctaattatttcagtggctgcagcagagggaccgcagtgtacttagatctcgatactgagacgtgactgttatgctgataaaggcaagagatcaataatttaggccccagctttaatggcaaagctgagagcttaagtgtctgcattcaggttgagtcttagaggttcttggagtattaataatttccataagattttttccccctttcttcttgagctgcagctgatcagcattcttgtacttgctaaattgtatttataaaaagatattcacctcctctatttgaacatatgtctgaatatcacataaatgtgtagcggcgtgcctttgcatcatgtgtgtacatctgattattcgcaactgtgtgtaacacatagcacatacagatttctgtttttgttcttatctggggagtgtccttcctcacattgcctttggcttttggactacccataatttgttctttcaaaattcatctggtaaatatgtaaccacttcaaaggcaggagtgagatgtcatccttttcctcctttcttttttttgttttcttttttcttttattctctgtctaatttctcctgctatcttaaagccacaattgtacttgactgaaaagggcaacaccaaagcattgagctcactcagatgtgggtgtccatgtgtatgtaatatagttctgagtttttatatagggtccttctttgagggattccagcaaacctgtttgaacccaagcaaatccatacaatacatacatgctaacagatatataaatgccatgaaaatgatcatagtatatgatatgttttatattaaggttgaaaaaaaaccccagcataacacagttaaggggctttcttggaagattagtcaccggggtgtttgtcacctatactaagaggtaaccagtgctccccagaaagggttggagtggggctgggagcgcccagaacctggatttctcccaaaggagacaacttgttctctagtgagtccaagcttcaggggccaccacgtctctccgctttcatcagcccaacctctctggcatttttttcttctggaaaattactaactttttttttttttttttttttttgagacggaatctcgcactgttgcctgggctggagtgcagtggcgggatctctgctcactgcaacctccgcctcccggcttcaagcgattctcctgcctcagcctcctgagtagctgggattacaggtgtgagccaccgcgcctggcgaaagttactaacatttttaagttgccctaagaaacttaactcctaggaatctgcttaaattttgactttgtaaattcagcaaagaaaacatttctttcaaccctaaacttctcaactagatgaaacttttatgggaatgccgtgattccacgcggatctctcggcacatgctacccccagccactagggggcagagcgacagacttgtggtttgctggtctctggagcttctggagtccccttgtcctctgctacaaaagcacaatgatagctgctactttattcgttactcccttgtagggaaagtaaagggatggggctatgaatatcgctgcttacacattgggaaactggggcacagagatgaaatgactatgagctgaaaacaagacgccagtacatacagaacatagagtttctaacatgagccagttccccgtccagctggccgttcaccaggtgtcagtgtttgtttgccttttagccatcagtccctggtaaacctccatgtctgtggtcctcaagtcgattatggttgagtcttcctactcttttttgtgtccccaagtagcttatttctagaaacaggttcccgtttgcaacatcaagtctggttatgctggggtcatgacttacacatggacaaagaggaaggatgagttgactctaaaccaaagagccatagtgtctttgtgttttcagtacaaatctagttgattctctggctttggtatacacatggttttcttcccttgctctttacttttcttggcttggccaaagtcaccattgctttgctgagttgggatgcaacatctgctttttgataattgccaccaaaacccattttccagttacagagacagttgacggctttggagtgaaagctaggagccaaggagtcctgagaaaactataaatgggcatggaatgtcctggataattctgtggtggggaaattaattctgaaccactaagtactattaagaagctgatgccaactaaataggcagaaatttttacaaaagctgccagagtttagaaaccacccagtgtgccatagcttcaggggagcaaaactacccactctaccaagttggaaaaaatgaagaatgcttcaaactgaatccagctgatcctggaggccactgaccctgtcctaatggagacaaaaagtgacagtgagtatttagttagaggaagaaatcacagcccccccccccccccacccaccaccaagaggatctttaaacttgatggaatgatgttatgattttatggtagccgtgaaaataaccctttctttagcatggtgcttatagtttgccaaatactttcattgatactgctatttgattctcagaacaactcaaagagattggcaagggaaatatgattaaccccattttaagataaggaaactgagctttagatgtctagaatggtttgcctgatgtcacacagctggtagatagcagaaccaggacaataattgaggtctttaattattggtcctgggttgacagatgatgccaccagatcttttccctaggaatttggtgaaaaagtataaaaccatttcattcaaggaaatggaatagaaatataaatttccttctagatctttattctacctctgtcacctgacccttgacatggaagagaataggacatgtctttcccttaccattcacttaagaagtattataggttggtgcaaaagtaattgcggtttttgccttactttcaatggcaaaaacctcaattacttttgtatcaaactaataataatcatgtttgtctgtcttcctagctcctctctgggggaggcagcagtctgcttcatcctgctaccacctccctgcctagcaccgcccaggcctagccagccagagtcagtgcaggctgtgtgggtgggaacttttttcatcagtaaggggcatcaggaattattctgatttatctcacctcttacctgcccaccattatgagggatcatgcactttactgcctttatggctacaagatccttttaccaggtattactcataccattatgaataagctccaggactgaaacccagaccccgcccccagacactgaggactgcctgctgtcttcttagtgctatatcccaccacactggcttagatgaaaactttcaagcagatcttggtggggatcagactagagatttctatgtttcatcagactaggttttagactttttgtgcatgcccgtgttctgtgtggactgtgtgccaggtctctctctactcttgcagtttgagtctggtaacctctcaccctcttttctcactaggacctctcccatcatgccttgctgttagggctatgccctttatatttggtatgaacgcgtgcagtttgcagacccagtctccttaccccagttcctgagcccaccttaatagaggagagctggattgaagtagcttactgcacagaggggtgcaagaaggaaatggaggcattttgcgttctttgtgctttaacaaattagtcttggaattgcctgggatgacctggggactccatggacctatgagtgctatatttgcccagaccaagtgcctgggcttctacatttaattccttctgttttcagatcctttcctgaacaagcagacaccttaagatactagatttatgtagtaggcatagagtaggtctgtctagctctcctactcctcaagatagtaggagaatggaactgagggtgaaccaaggtgtgaaagtaaaaccaaatccaggagggccaaagcgtcaaaccaagaaggcaaggccgagaggcaggattgtgtgaacaggtggaaactagaacaccatgcccaagcaagatggttgctaaggataggatacaaaatctcaagccacagagcctggctgccacaagtgtggagtttatggtcaacagctttttgggcacagacaccagatctggaaatggattataattgaagcgtttaagaggagagcctctggagtgccattgcctgggttcaaagcctgcagccccctaacttgctagctaagtgacattgaaactatttaactgtcctgcttcatacgcattaatgtccttgttgctgttttctcagtgtcattcactccctagctgccaagtgttcctttgcccaaaccttgagccctgagggggctcaggtctgcttttaaatgaatgtgctacccaactacctaaaaggaatgactgttggaatgtttttacttttaaataagactaatgtgtcaggctcatctcaacactgtcatacccagtgggacattctaggtaggattcttggcctagtttctacctttttttttcccaactggaaggtaattctaaggtttcaacatgattccaggcaagtccccatggtttatgacaaataagagcatcttctttgcatatactgcttgacattttttttttttttttttttaagacggagtctcgctctgtcgcccaggccggactgcggactgcagtggcacaatctcggctcactgcaagctccgcttcccgggttcacgccattctcctgcctcagcctcccgagtagctgggactacaggcgcccgccaccgcgcccggctaattttttgtatttttagtagagacggggtttcaccttgttagccaggatggtctcgatctcctgacctcatgatccacccgcctcggcctcccaaagtgctgggattacaggcgtgagccaccgcgcccggccttactgcttgacattttacaaaacgccatcatttgcaccatttacaattttgaaggtgctgtgggatccttaagaaaagtataagaactgatctctgccttaggggaacttctagtgttcagaagaaaagactaaaatatgtaaaccacagatgataatgttcaatgaagttgataattatgtggcatgggttaaaagtataatgatatttcagagacaaaagcagtggtttggggttcatgaaaattaaggttggcttcattgagaggaggtagggatggggtgaagaaatggggcaggaacagatacatagaaatcttagtgtgtgcagggtggggacacatggtgtagtaagaggggatagtagccagcactaaggaagcacggaagtactttggcaagggaagagggtgacaatgaggggattggcttggccgtgatgcagatttgaggttacagtagtgatggaataggatggcattagtagggtcagattatggagaggaggcaaagggaattttaagtaggtaattcacatatattttgttaaaaaccctatccatttagtattattggctccattttaaagaaaatgtatgggtagtatgcacacccaggtctgtctaaaaccaacctcttttcaattcaacatggtaccttaactcaagaaaggatggtaggcttgatgtgattggtagtggggaatcattgtgggttcttgaacagaggagatatagtgaaagggggtgatccaatggaattgtttactgcgcatgtatccatatgtttatataggatgaggatgtcctttggtggaacagatagaggaacaaaagacgcaaagctgaaggccatatgatggactcagctcctgagctctgcattccttttctgtgtacccaggagccgccagccctgtttgtatccacacaaggctctctgtgtatcacagccagcatagaaggcataatcctcctcgggtctgtgtctctataatttatgatgctttcagattaccaaacacaattcatttggcaatgaaagagaatagttttgtgctattgtcctccatgtgtgggaaattgcatttttgatgagcagagccattggccttcttcacgtgactggctgagaacatgagctggtaaccaaggcctgagtgaaaagtcttgggaaccagtcatccagctgccacagcccatttaggggaaggctaaccccacatccctgcaacaatttaacctatgtcttgtaatctgttagttttcatcagccaatatgtacacttatataattatctcagcaaaacccctctttattaaagaagaaggtgatagattgttactatcaacacagtgctaaggaaaccacagctaagggtatcttcttcacacgccactctctcatcctcagtcggcatggtagttttatgaacaactttttttttttctcttagggcatctgttagatgcattccaagctccaggggagacctgtgtggaggtgcaagaaggaggagctctaaggttattttaatttagatttatctgagactccagaaaaatcacgtacgtggtgtggaaattatcctcacataggcagagggagaaaacactaaattcatattctacatgtatcttcttgtatcaagaccagtgttttcagaaatgagtttgccaataaatataaaaaccatccatcggttttcttcccaatactcattcttcccctaaacgttacataggtttttatactcttaattaaccacatccaataatttgtttcctaggctgggctagctggatgatgcctttttatctggttaaagaagagtcaccaggcaggaaatgatggtagagagatggaagactacaaaacccttgccaaattctgcactttttgttagtttgtttgcactgcggaaggatgaagacagtgagacagttactgagaccatcggctgctgtggacatcacagtgggagcagtctactgggtgggaggggtgctgtcaggtcttggggaccttagtaggagacaagtaaaattatgatgcagtggaaaggctcctttgaaaacaggtgatgggacacagtgtatgcaatcctgtgggcttttgctgcaagtaggcagacccctttcgtttgacctttttatttataaagtcacaatctgagatcatcagattgtcaacaactacaacaataaatccaaggtcattggatctgaaacccaacacctgtattgaatcttaagaaaaagaagacaggttgtattcatttaagcattgtctaagtaattaggagacaaaatttgctattatcgtatgtttcacagttatgttctaaatttatgcacctgtgagtagcactataggttttcattaatgtttgtgttctcatttgatctttataactaccctgtgaaataggtacttaggacaaacattgatcacccctcattttaaagatggaaaacctgaggctcagaaaaatgaagctcacaaattatgtcttatgactccaaactcctgctggtttttttttatttgtctgaaaactgactgatgtgatcttatttggacaaaggagtgttgttggaaatatcagtcacgtgaattaattaacaatttcttccttcctagcgagagtaagaccatggagtagagcagatatattagtccattccatgtggaaatccggcctgtagttgtatattcgtatagctatatgttggtaggatggacctacatggtttaatgaaagtggaaggaaaatctattttcagtcagatcctatagatatttcataaggaattagaacttagttacttaaaaattatattctagaggtttataaagcaaacatttattatattcatttacctttttaaaaaattttaagcaaagcccatactcctgttttggggatatctgaaagagagagcatttacaactttagaattacagattcatgagggatctgattttattttctttttcaactttaatttttgattcagtgggtacacatacaggttttattacctgagtatattgtgtgatgctgaggtttggtgtacagataaagcgatctgattttatactcttatgcagtggatctaccactactacaatgactgctacagggctgctaatgtttctgaatattgtctaagtacttctagaaataggaaagaagatcacagaatcataaattcttctatcttaaaggagccttcaggataattattattttacaaaaaaatgcagctaggctattgtatacatcaaacaggctgttttttctcatggtgaactgaatctgcttcagtggaactttccccattctgtctgaggtctccctttggacacaatgtagaataaatctattgctctcctgcattcaaatagttgaagacttattttttacctcttcatcttctcttccctaggctgaacgaaacgaaaactctcagttccttaggtttctgtgcattatttctaatttattcttaattcataactctatagacacttacagaacacctactatgtgtgagcctggcatttttaatttaaaaccctttcctggccaggaatggtggctcatgcctgtaatcccagcactttgggaggccatgggaagagtattgcttgagcccaggagttcgagaccagcctgactctactaagaatttaaaaattaacctgtcatgatgggagcgtgcctgtagtcccagctacccaggaggctgaggtggaaggattgcttgggcccaggagttcgaggctatagtgtgagatcctatctcaaataaatacattaataaatcattttctttgtaatacaaactcaacctaagaactagataaaagaaagccgattttacttttttcctttgtgctcaggtaatagaaaatgaaatttgtatgtatgtttataacatgtacatttatacctgtatatacatattcatatgtatttttaatcatagggaatgaacactagaaagtaaatgaaaaatgagttgaaaaactaagcatttaaaataaatcaattgacttttgatatattaagatattaatttcaaggttaattatagcctcctcttagagatacaactgttcaaagatacatcatcacagctgattgtcaggcctagatgcctgtgaggagagagactcagcttcagtaacctgttgaagccagaacatagaaagtaaatgaaaactcaattgtaaaaacattcattagtttaaaccctagacactggggcctactttagagtggagcgtggaagaggagtgaggactgaaaaactacctatgaggtactatgcttattacctggttgacaaaataattcatacacccatcccccatgacatgtaatttacctgtataacaaacctacacatgcacccctgaacctaaaacaaaagttaaaaaaaaattaaacccttttgtcctcaatgttttgatatttggtcccgggaactcaaatttgcctttgtcttaactggtaaaaatatttacccggaaatgaagaaacattaaatacactaatatgtaaagacttcagagggaacgtttaagaatccaagcaatcaaaatagcacctttaagtatttctgtagtgtatgctgtaagtactctataaaaatgtattaatatgtcttgttaaaatgccatttacatacaatggtaacataattataattacacgtctttcttacagatttattaaaacagatgtgatctaccaataatgttttacatctgatggaaagaattggaatataataatcctacttttctttaatgcattactaattcagacaggcccttctggttgttctgaattggagagagagcagacacttcagttggatttggaatcatccacttttttttgcaggtatttcgaaaaaagcctggttttggtacagctcttccagaacccacgggaagaacctgttcatcagctcatccatccgtctgctgagtaaatgcttattgagcatctactgaatgccagcactgttctttgttcttggaatacatcagtaaacaaaataaggaaaacaaaaccaaacctcctgacctcaaggagcttttattttaggaatgatgtcttttagtcatttaatagttgctgtttttattaactcttaactgtacccataaactggatactttcaacttaaaaaaaaaaaagagaaactaattatgtgccctaaggatcaccaggccttaggttctacctttatttttcttctactgttaaatagcaacctcattcctcaggctgctgatggaattggtaactgagtaatcaggccactgtgctcggggacataaaacctgtggctgctgccattgcagagtcccgtcatggatcagagttcgtccctgggaaacaacttgtgccgacggaaggagttcttcctttgctcccctcatacctcccttccttgcagatgggatccttgcaagggcagagcagctcttagagttgtcaggcccttttctttcattctgcttattttcccataggcgagtactgctcagaacccaggctgtgagttttttgatgtggaaagctatttactaagcatgtcttgacgcagaggatggagggaaagaaagcctccaagagagtggtgattctacaaccatcatcaaattttggttgaaaactcaaagctgctgatatgtattagtaagcagataacagtaacatcctgtatttgcatggccctgtatcagtcaatagcattcagatttgtgtggtggtgtatagctttccttatttcatatcaggtgttttcatttgatcccaagtggtatgtcctgagacagaagaaatagccccattttacagaagaagaaacccaaaattgcaaggaatttgcctaaggtcattagaaagtgtctaaaataagactttgacccggactctctgatttcaagcccagcgattcttctaacaggccatattctttcacttttattatcttgacttacgcaacaaaggagataagccaggtacatgtcattaatcttcctatgtatgacaactgaggctccaggaggttaagtgccttgcctaagattacttgggtggtggtagaactggttttcaaaaccagatcatctgaatggaatctaagtctttcttctgtatcaccttgttaatgtgtcaggaactaccaccccaccttccaaaacacatacacactctcacttttaatgcggacccatcttagaataaactagttaaggactgactgctgaacatggtccagaaacttactgtcaaattttgcttttgagatgtgcttgtgttgtgtgaagtctttttttttttttttcagtattgatgagggatcactttaagatttattggattttgtttgttttgttttgttttgttttgtttttgagacaggatttcactcttatcacccaggctggagtggagtggcgtgatcatagttcacttcagcctctaactcctgggcaccagcaatcctcctgagtagctgggaatataggcatgtgccaacacaccaggctaattttatgtattttttagattttcatagagatgaaggggtctcagtatgttgctcaggctggtcttgaactcctagcctcaaatgatcctcctgcattggccttcccaaatactgggattacaagcatgagccactgcgcccagcctgtaattattctaaagatttctttcctgtttatgtacagaatatctaacagctatgcttacctttaaagcagccttatgaatatccttgtgaattccttaagctcaagggtcttgtttgcattttgtaggtatatctgtagatagatcttacctatctctggcaggtaacattatcatcatgttttccctgtttctggacactttgtgaaagcattgtagaaataaaagaagtctttattctttgacctctcttatgcattatgaattctgaaaaactgagggagataaaaggcaatctatgctttactgctttccctaagttttgagaagcaggcttaaaaaaatgctttaaaaattttagatgccataatacactgaaaatagggatctcaggtatttgaggcagaccaggattcttctttgaccagtcctttcactgaaaagactgtatttagatatttctctgagtgttctagattcatagacccaaatgacctctctgagcatcaagatacatgaagaagttacttcctgaggataataaatatgaaaagagaattatcaccctctgctttcagaaatcacttaaaaaggaagggagtgcttttcccatgaggttcctgagacagagtccttatgtcaccttgtattggcaaaaagatctggggcactgtgtttgacgatagcacttctttgttcccctcccgatatatttacagaatataatcctattttgcttgcactcatttccataatactgaaagtaaataaaccttatataacgttttatggttaagaactacttagtcttgtgtgtggaacttcagcaagaagcaaaagaaaattcacttatagatatgttacctcacgtaatcctcaccacaaccttaggaattagacataaattacaagaaccaattactgattgggaaagtaagtctcagagaggttaatgacttcctcaaggacacaggatgtttcttgatctgaccaagacgcgggcctcgttttctgaatccagggttctagtcctgtcttttaggagatgtctaagtcatacaaaagcatcactggcagattccaccagtgttttattcacaccttgcaacagcctgctttttgaaggtttcttgctgtcatggctattcattcctatgaggtggaaatggcttttttggtatctctttgcattattacagttgttgttatttttagttctatttatatgaaaaatgtactttttagcccacaaaaatagcatagcagcagcttatcaaaatgtcccagacaagtttacttcaacaaattagtaacaccttcatgcttcctgtggtggaagaaatgcagagtccacttcctcccagtgaacatctgagccagatttctgctccactcggtcccccttcccacctcttacagccatgaaataatgtgagagtatttgtttcccctgcaaagggaagagggtccagagacaaaagggaagttagtattcactggaagcctccctgtacaagcaacagtgttaggacttttatacacatttttacaattattacagcagttctcaattattgaaacagagggtaggcatttcccctttttcagaagggaaaagtgagaattaagttaattccaaagtcacacagctagtgagagaaaaagcctggacaggaactcagactgtatgactccaaaggctaagtgcattctatacacacaggccgccctcctggcagtgagagttcaggatctgttggagaaaacctcagaccatggttttcttgcagcttctgctggagaacattaggtgcctgttcccccgtggtgagtgttacaaagtgcagcaccacccaggggaagagtctgggccttggagttagacctgagtttgaatcctccttcagatatttactattgatgacattggcaatcaatgctgctgaatttctccagccctccatttattcatctattaaggggagagctacctacagggcggggaacttacaaggattagatgaggggatatgtgtaaaggcctaacacccagtaggtgctcactaaatgatgttccttattattatggtgattaccactgtactcttttcagatgaaagtgttcggtcacctggaacctgtgagtatgtggtttttgatctgtgactaaactgttcacccatttcccagtttctctgctgtgtcaaatatcaacattttaccaggtttctctgttgttgccaaacctgtcatttttatttggtgtggcttcttgggaaacttccatggcccatttgatgggaatcaaacagagtgaaaacaaggacagatgcagcagaggtggcatcaggaacaaatgggtcataagaacttaccttggcagcagccccagaatggtcaggaggaaaggcactttaaggtatcagaaggtagaaaggagaggttggatgatagaatggggaagggattcctccttgtgttcacagaagtgaatcaatgggagacacaaggttaccacttaatattcctgctctcctaggcatgggtcaggtacatcttcagccatgggtaagtttgttcaacaaatgagtgatctttgggaggctgaggcgggcggatcacgaggtcaggagattgagaccatcctggctaacacgatgaaaccccgtctctactaaaaatacaaaaattagccgggtgtggtggcgggcgcctgtagtcccagctactcgggaggctggggtaggagaatgtcgtgaacctgggaggcagagcttgctgtaagcagagatcgtgccactgcactccagcctgggcgacagagcgagactgcatcccaaaaaaaaaaccaaaaaaacgaaaacaaaaacaaaaccaaatgagtgatgcattgacctttcgtaattcttggatgcaaaagtagaactcaagctacttaataacaatcatggtggcatgggcaccagcaagtcagggtggacaacagccatagttctggagcatggtcctcaagactaccttttgtatgcagagtattaacactttaactcttagatccttggaacataaggaagagaggctggaacaaaaaggggttggcatttggaggtggagaggtagtgtaaggcacaactgtttatcaactggtatctaagtatttcaggccagacacgtggctcacacctctaatcccagcactttgggaggctgagccaggaggattgcttgagtctaggagttcaagaccggtctgggcaacatggtgaaaccctgtctctacaaaaaatacaaaaattagccaggtgtggtggggcacgcctatggtcccagctactggggaggctgagatgggaggatccacctgagcccttgggggtcgaggctgtagcaagtcatgattgcaccactgcactccagctgggtgataaagtgagaccttgtctaaaaaaaaaaaaaaaaaaaaaaggaaatagtttagtgtctagcttctggtccacttgtactggtgttgactatgtatcagcccagcttatgtggctacagggattctcgttgcacatctgaatgaagccaaaaacatacgcaaggttttaagagtatttgatgtcttattggcaatatgaggtggaccagccatacagttagtaacataaccagcattggcttctggcacttagttctgagttctttccgaagaacttatatatgcagaaactggacttagcactcacttaaagaagaaataactttgataagaaccaggtgggttgttctttctctttattggtttcatgttttcagatcttgctaactctccccagctgtgccctgcagtggagacctatttgagactctgttatgatatgcccaagataccacacatgccctaggctcttcccctagcgacaaccatggtgctctctaggaactaatctttgtggcaaagacctttgcccgggggacacctgcctctcccagctcttttcccctcatgtcaaggaccatgcatctcatgctatcttttcatcgtcattttctcaaccttagggctttatctttgaaacgtgtgcatccgcctttagacactttatcattaactggaaattactgttcagatagacttgaggataattattcacgttattaaaaaacattcctcagttcggtaaagtatttggtagcaagctcctataagtagagagagtttctgatgtatttgagtacagatcaattacaacttgaaggagaggttggtgcattgctgaagaacttttaataaagttgcaggtgctgtcagaaatggaaccatacctgaaaaataataactgaaatttcttcagttccatagcattgcaaaacttacttccgcatttgctcatgtgatatatgggatttccatctctaatcctttgcaagatggaaagtctgccacatacatttctagcgagccatgaggtagctggaaactgccaccatgccatacctaaccccactcacaccagggccatgacctcttacacctcttttttaaggtcttcatcaatgacacatgaccctaacaacacatgactctgtcgccactttccattcttcccccaatatctccccttctaggagatttcagagctttgctcttctctattaaatgattgtcatcctcagatgtgggctaagaaaaaaataggatctgatttcctgaactcttctttgcacacagcctttcatggaaactgctgtaatgcaagtctgggtattccctgaagtggcccttcatgtcactatttgactaaggaataggagggaacaaccccgtcttgcctcatccctgctctctcagccaaagaagacctgtgtctggctggagggtggcgtcgcgcctccccttggtgccgcaggccacgcagagaggcaacgaccttcctccagggctcctatcgagctggggaatgagtaattgggactcgccaaagtgtttaaacaccagaattgaaattaatgtcccctcattgctgggtacgctgacaatacattacggcaaacaccttcccaaagtgaaatgaatgtttgtttatcctcatgaaatatacatcaaaacatgttggtggaagaagccctaatgagggaaggggccaggtttctgttaattcttggcaaatagttaactgaagtggaaggtttttttttctttttctttttcattcttcttttttcttttcttttttttttcctccagaataacctgtccacagctgtgtatctaggacattaatatgggtttaatgaaaactccagttgatctgtccaaagatattgatgagcattgcccaggcgtattaatcatctccttgagggaggaaatgaagggaatgggcgagcaggtttctgtcagatgccaatccagatgaagagatgtgaaaagaaatttttttaatcctccatagctatatccatttcctgggacatgggttggcccaagagggaatgagaaggacctgcgattgcacaggaaattctggggcacatttaacgttaaatcattaagcttctgccaataaatccattactgttaattacactgagatggccaacgatctgctgacaatattccttcattgattttcattctcagtgaatcgatgttctggcttggctctctttggtgttttcattctttcatttctttctccctgtcctcatctctctctccccgtgccctgctccctacacctatccctccccctccccttgagctttttcagtaatgcagttcccctctcactggtgatacagttctctccctaagtgccaaatgtttcttgataggaacaagctacatttctttatggcttatggcaaactgccttgattacttctactgctgtacccattatgtgaattaaatatgtattcagttgcatgctgcttgcgatgttattgcagggtgacatatggtactgactcaattagaatgaaactagcattagataacccttctgattacatgcatcctgaccggctcctcctcggcctcccctctgtgctctcgctctccagtgtctggaggccgcagattttcattatctctgccacatcggatgcaggatgggggtgggagagggaggggcctgtggatctctgggaaagaaagcggatcagacagacagactgctgtgaaagggttggtggggaagaatagagaggcctctgtgcttgcatttggaattaacatttacaattatattttttggaagtggttgtcaggcctactctgaaaaggggctggaaaggtctctctagagttgtgaagcaacggctgcatgtgattagtcagtccttaccttgaaatgatttatttaaaaagaatacattgttcgggcgcagtggctcatgtctgtaatcctagcatgggaggccgaagcagaagggttgcttgagcttagaagtttgagaccagcctgggcaacatagcaagactctgtctctaaaagaagaaaaaatttaagcttttcttaaaaaaaaaaaaaaatcttttttctgttgttgctgtttcttttttaatgcagagctaatactctactaccagtaatatattttgttttcatatcacaccaatattcagtatatgttaacctgttggattttcatcatatcacaccaatattcaatatatgttaacctgtttgattttcatcagcatctgacaacacaggtagactaggaatcatccccctgttttacggatgatgcggtggagattcggagaggcttggctgcattacagtttgaagtcacaaagtccctgagtgcccaaatgagggggaatccttaaaatgcagggggttctgaagggcaactcaaggatgcattgtaaagtgatcaagagttgttaaatctttttttttttttttttttttgtgacagagtctccctttgtcacccaggctggagtgcagtggtgcaatctcggctcactgcaacctctgcttcccgggttcaagtgattctcctgcctcagcctcttgaatagctgggattacaggcatgcaccaccatgcccggctaatttttgtattttttgtagagatggggtttcgccatgttggccaactggtctcgaactcccggcctcaagtgatcctcccaccttggcctcccaaagtgctggggttacaggcatgagccactgtgcccggcgagagttgtttaatcttgaaaagttgtctagcatagttggtgctggaatatctggaatatcacatcctgacataatacaaatcacactagagtactgtgggcatatgacatttccttatgaggagtaattttctctctgtgataattttaactgtgttttagagtgttctaagcttccttcctccagctctatcacttccagttgccaagcaagaacttatagacagacccattctctttcagtcccatctagacacacctgaggctgaagcgtcttctaggctaggggctaccacagggcactgatagagagcagagagcttgcaggcaaccttggcttttctcaagcgctggtagaaaggctgctgggtctgagatcacccaactgatgttgcgtcaccataaaataagacttcttgcctgtgagcagctcaagttagcaggcatatttgagtgtcttccacagatccccaatctggaaatctgaaaaccagaatgctcccaaatctgagaatttttgagcaccaccatgatgccacaagtggaaaattctgcacctgacctcaggtgactacacagtcaaagcatagtcagaactttgttttatgcacaaaatcattaaagtgttatataaaattacctttagggtctgtgtgtaaactatatgagatacaaatgaatcttgtgtatagacatgggtctcatccccaagacactattacgtatatgcaaaaattccaaaatctgaagacagtaatcccaaattcgaaacacttctgacccaagcattttggataagagatactaaacctgtatacgtgcttgtgtgtaccacattatatgctgtgggaaatacaaagtgtacgtagacagctggctataggcagctcatacgcaggcagaagtggccataggcagctcatacccaggcagaagtgaatatcatgagggtaagtgtaagtgaggatggtgtgaactcagaagtgccatagatgcacttaaatgattttagtgttttttatgctgtcactcagcccattgccttgagtatagcaggcttttaacaaacataggttgaatggatgtggggatgaatgaaagggagggtgtgaactatgatataatgaggcaggttttcgtggaggaaatgggaccccttatagataacacaaccatccattcccaccccaccactccctcccctcctgcttttcaattataataatgataactaagttatgcagcactttatatttaaagtaaccctttcaagaaatgctggaaagataagcaagaaatgaagaaaaatggttatcagtagaggccaggtgtgagcgtggggaatagggttaacagggccaaacaagggtgggagcaagacttggcaatgtatggtgatcataatgtatattgtagatgtattttttatattgtaaatgcattaactactcaaaaataatattaaaatcaaagaaattttctggagcattagcttacccagtcttcacagtcgccctttaaatgggctgcacagttttactaggttctaatttcatgaaagggaatcgaagaatgtaaataacttacctaagatcatagagttagtaagttgtagaggcaagactagcccagattgggttctttctaccacagcatatggcttctgtgaacattgtcccaactgtgctaatccccagagaggtttatggctatgtggttgggaccttccctgagaccactgttcgccaaggtcactgtgtgtgccccacaggcctctgcaggaagaaagagttggaagctcagggttcttctccccactgccactgtaacacagcagatttaaactacaagcaacagcagagcagagcagagtttggatgtacaagatgagctgtctctgaactggccctgtggttcatgctcgctgttgcagaagggaggaagtgtgaagcagatggcctttgcctggttttcagggtggccctgagatacacagggtgcctgctgaggaatgagggagctattacaattattataatacctggaagggccgaagaacaaatcaggcactgaaagcaccaaaagttgttgatcttgtaaatttaggacagtgcgacttacgttcttgagagcaaagtatgacatttttatggcatgctttaggtagggtccccactattctataggtgtttatactgcttcagttgcttcacagctcccccttctttcctaccacacctgacactccccaccattttccatcggcaggggagctacctagagctgccttacttggcagagcagaggtagcacctgtgtcattggctgttctagtgtgctgtcatctagcatatctgttattccatctgcagccttcacacacttttgctctccaggtccagtgagttcatacatagcaagggcttttcctgagtatcatgtagccaatgaagaacagatctgtccatagactcctggaaggtaatttgctgctctgaacaccatgacgtctgccttttcacaacgtgcagctaatcataggcaccttatgcccaagattgcctttcacaagagttgtgaaagtgctctcccagtctggttccttctatgggccatattctgttttgatgttgtctaaaagtgtcctctgtatcttctgtacctcctaacccaggtcccacctccatgaaacctttaggattatctcagatgtcacagaactagagagactagtgattctaagatttctagctttttttttcaattaacttctagagtgctttgttttctttgctgaagtcagatttctgcccctgcagattatgaaatcacccagtggacaaattcagtccttattctacactcttgctgtatttgatcctgacaacctttctattataaaattctcatttcttcatctctgtattctcttggtttgcttcatatctctttggttgggcctccttagttaacttcaatgttgcctcctcagcccatcactaagtattcgtatgcctgcatttatcaactaaatacctatggctcacaaatatatccatctgtgatctcactgaggacagaggacttatcttctttgtcaaccgctgcatccccagtgaggagtacaatgtctggactaaaacaagtatccagtaagtatttattgaacaaatggtaaagtaaaacctatatgtttagcccagattgcttttgtgagtttcagatctacacatataactgcccggcaagcatctctatatccatgttcagcagatttataaatccagagcagacctcatcaatccccatccacaacaagtcttcctcctgtattccgtcttttatctgcccaatctagaaacctaatatttgtatcagactttaacctttttctatgtcacctcccactaccttcatctaatcattagccaatttgtgttgatactaccagcaagcatttaatgaacactttatgccaagacttataaaactaaacacattctaactatttctcatttctccttcttcccatctgctgtcatcctaagtcaggcactcactatctttcacccattcagcagtattgacctcttgactggtgtctctgcctgtaatatccttaagcagcccatcgcatctgaggcctgccaggagactcttaacatgctaacctgcttgctatacccttattcaaaattctttgatggaggtcccattgtcaaaagctgcagtcctgaatctcaaaactgttgtgccatgatcagttgtgaagtatgtcacaagtaattttgatattaataatggttcaagacctaaggtttgcaaattatttaaaattttaagctaagtcaaattatcaccatataaatgtcactttcgctcacttgaattcccatatgctttctttagtggaagagaaagagtggcattacagtctgctgagaattattcattttggtctgtaggatgaaatctaaactcctttgcataacctacatgaaccttgtgatctagtccttgcctacttcaccagggctatttctcaccatttttttctatctcatcatatgctacaaatatactgagttacctgtaatacctaaaacctgccacttctttcttatacctttgaagattgtctcctactagcgatttcttgtacctgttatcccctaaaacactcttactgatcattcagatcctggctgaggccttgcctgagtatcctgacccagttctagatattcctcttcctttgtatccactttgccttgtatattccttcattgtagcttataataattacatggtgtttttagcatgttcgtttccccgttggactgtaagttaatgccttttcatgttcttctcccaatttttagtacatggctgaacatatggtaggtgctctgtaatcttatccactggtcccaacattcttcagaatcaggcaactttagtaccacatcataacttaatagataaaagcgagagagccctggacagggagtttgagcagctagtcctagctcgtctataatgattctgtggcccttgacatgttacacaaaacttatatctatctcagtttctatgtgtatggtctgtttgtaggacttccctatgaaatggtggtttagaccaagttggaaggtgtgcattgattggaaaatacaggaagtaggatagagtaggcaaagtgaggcccatgtgcttgccattgatagtctgtcattgaatgtctagctgggagtaataaatggagacccagtcgttatttgagcatagatgacatgttctgaaattagattgaaggacttctcatctggtaaaaatgtgccggatgtactagagtgtagagagagtgaagaaacagatttcagccaggagacaaaaggatctgggatctgctatcttgggaatgaaaaagatcacacttttttcaaaaagtttttgaaaaaaagaatgacagagcctggtaaccacctagatatggaagttgaaggaaaggtatgaattgaagatgatggaatcatttaattcatttatttatttggattccacagaaagtttgaggtgggatatgactcagtacaatgaaaactgttaggcatatggctggagggtgtggtcacagatgctggctttgtcatgtaactcggaaataaggctttgccaggattgtcgtagagtttgctgcatcgtatgcaagtttggactagactctaagatatctcccatgtctgtctatgtgtttatctttgtaagttctctgatttgttacctgagagaatgggtttggcattaattaataggaataaggaaatcagggaagggaggggatttggatgccaggtagagttttcttcatttcagattgtggtagatcttttgagtttcactgaatgttgtgataacttctgtataattgttgactttccttttggctttgtctctgactttcataggatagcgctgtatctgttagaatcatactctgttttcaggctgtccctaggctgagctcactagttccagtgacctctttctggtaggaggtcagagtttattgagtgacagtggaccagaataaaattatagtggaaaagaatttgggttttggagtcagactgacccaaatttgtgttctatatcctttgtctattttgtgacattagcaggttacctaattttcatatgtccgtcttctcaatactgcaagtggggataatatcacctacttcatggggtttggtgaaagattaaaataataatagctaatattaatttagggattagttactaagcactgctattttacattcattatctcgtttaatcctccctgcaaaatctataaagtatgtattttcattgtccctgttacactgaccagtagagggattaaataatttgccctgttacctgactaggaattggcagagcagggattagaacctaggttgaatgactgcagaatctgagcctttaataactgaaagcacggcagcttcccaaatgtcaccctttctatgaaaatgtgaaatctctagtaagaccctctttcagattaatcacctcttctaccatgctcctataacaaaattcctgaaactttaattagcccttttctattctatgtcaaccctttattcaacccttaattttaatcatttttatacgtccccttctcttcactaaattataaacttttaaaaacaaaaactgtgtttacctatgtatttttgcattcaattcctttatacacaggaagtctcaatgttaatttgttgcaaagaaattatttgaaaggctcatgccttccctagggggacatctttagccacttggtgccttgaggtcacctttacttttccatcatcaaaataggaaaattaaactgtcacagagtactacgaatagcagtaatgaaatattatcatttaaaataaggatataatatcacttagcctgattgtggtcttcacatcacctcccccgaccaaagaaaagtcataaaagcagaagtgttctttgcctcagtggtttagattgtttgtgatatttggaattgaactagacaagaagagacgtatcaggaaccagttcctccttgcctccaggtatcagacatgctagatcccagttggtcttaactttttgtctcacttacccctttggttggaatgcaggcattattctgaagctttgtggtaagcgacttggattttctagtgtcgggctcttctcttttttaggaagggagaagcgggtctgggaaattaaagtgcctgtatctcccagggcaccgattgttaagagggttgggacctcagtatgttttttttccattctgccacacctgagatagaaaaaagaaataccacggtccctcgggtagcagtagagggtgagagcaagactcctacctctgaatgccgttagatttagaagttcattttgactgctttacgatacaaagttgagtaataataatggtcttactggtataaataataagcacagagtgtttcatacatatcaaagcaatttcgtacattgtagttctcattctttgagaaacagccttgtggggttgaacagaaggaattacagaattgtgtttgacggtgttgagtgagaaatttttagctgtttttcttattttgttccctgttccctcatttttttcttatcctgagttagtctcttgatttacatctcggcattcaggactcaatgttgccagcctcccgcatctgaagtagctgagagccaggatgctagcagaggatatctgtgtagccaaactaagggcccatgtacttaagtttgtgcagttgactcatcagagcgcccaaaagccaccactcaagacctctgatttcaaatatgattctaattgtatgtttatctggcttcctagcctgtgccagactatatacatgataatctctaacatttactaagtacttactaactgagacactctcctaaatactctcaagcattcactcaggtaatcctcacaaccacactagaacacgaggtaccacaactgcctccattttacatgtgaggacagagcacaggggggttttgaaacaaggtcccaagccagtagtcaggtctggcttccatgatctggaaccacagcccatgctatcagctatagcactacaacctcagaagagggggaaacttaaagaagcagtaaaatcataaaaaggagactcaagaatttaaaaagaccagcagactgagtctatacagaataggcatgcgtgctctcacatagcagcgggcctgggtgatcatcagcattcctaatgataaatgacgtgggtcacaaagaggaggccaaataatgtccaagatccctctctatctatctacctagatattttttaaaagaagctagatggaaatataacatgttttagaagattactatcgaaaatgatgaaaatacaaatagttttggtaaagctccagtaacagggagccaagctttcaaaagtgatttatttttcagtagttaacgtttttgtgcctttctacctgctcgtgggttccagagtctctgttgcctggtgtctccccgagaacaaagattgtggatccccaaagtacctccacctcctcactggactcctgctccagaaaagatgaccataatctaataatcactctaccgcatgaacagggtgtcacacatgtgcttgactgtgcctctacagtggcaggtagagcgagtgcagtgcaggaaatatcagcccttttctaaagcactatgaagatgaaagggggaggtggtcaggggatggagaggacggaggggaaatcacttctttgtctaaaagggaaatgccaggactgtcccttcaggtctgttaagtgtctataggatgtggaggaaaattcttcttctcgttgctcccacctctccccatcccctttattctttctcactttgtagaataatataaaaaagcccagcagaaagggagctgtgatgctgtcgtccctggcgttgatgttatttattttcctcagttgctgctctggaagcccggagttgacagagcggttttgtagaatagaaacattatagactgttactgtcagagtgttaaatgtgatggatagagaaatagaggcgaaggaggggacttaatactgagagccagggtgctcatgggaaaataaaccatccgcatataagaaatgaatgaggtaatgtggcgggaggtaatgggctttcgcaacatgccggaacagagatgcttattacagggtgtgcttaacccttggcatgctgatttccctttgtgggttccagggcttttcgctgggtccctctgtgggagcatgtgtgtggcttttcttcaggcagggaagccagcgtgtgtagaggagtggaggcaaacgcattcttaataacactgtattagcagcctgtacatcagagagcttggcagctcctgagggacacgggactcccgtggctgtgtgagacagaatgtgccaggattgctgggttatggagaagccaaggaaggcacatcaagggagcgtgaggttctgttatttctccattggagacttaagagaagtgctttggttacgtaggggaggagattcatgttacttgattctcttagtggcacccgaaggtttcttgctactcttcgtagcaaatactagctgtttaccactgaccagaatgtggtggctttgctctaggttgggggacacgggagcagacagtgatcatctttattacctcatggtctagttacagtgcatggtacagaggtaataataaaggtgatcgtgtcaggtggagaccctgcagcagataggatgatggaaggggacccaactctcctggatgaggtaggtgaattaaactgaaggtttgccagtttcagtgaacaaggtgcttttcccttgtgttgggtttctatgacttttttcacccatctttgtgttttggtggtggccagccctgtatattgccacttagctgatatggactcccatctgcctctgacagttgcctgctgtgtggccttgagcatgtcattgaacctctctgggtgttagtttcttcatctgtaacatgagaataataacacttcataaattcattagcaagactaaacataatcatgcctatgaaagtgtggtagcctctaaaacattacgcaaatagccaagtattatcattatttctgttagtaatgaaacaatatatgcgtgtcagataataaggtaaagctccaactcctaatcttttcaggagactctttgcctttttgcatttttttttcccctgctaggatacatagagtggtaagatatgtagaaagcagagttcaggggaaagttagaatgaggcagagcttccaggatagtactttcttgttgatctgttatttttctaaacctttttcttttctgtgttgaaacacaatgccattttttgaacttcaccaattgttatctcagatatggatatgcctgaggcctgggcaagtcagggcagtgccactccagtttcagaaaagaaagtgtgatggggttcagcaggggaattgctgttgtacttcattagccaagctcagtaattccaagaatacccctgcgggtgtgggtgtttatgaaatgcagattcacaggccttgccccagcaaatttgataggagtctaggaatctgtatttcacaaacactgtcaatgaatcccatgcctgtggtacttacgtcacttattagaaactacctcttccttcacactctctcccactcccctgtggtgatggtctagttactggtcttaaaggtgataactcactactattcaagagtaattaaaatgccaccaatgccctcacttcatcagcacatgggtcctgcacaagactgattgtgcacatttttaaagcattttgtattttttgaccgagctctgtacttatgatttgtgtcattttctatctctgtattatgtgttcagaaagttttttataatagcaccgatattgcttttattagtggtactgtgacatatgactgagacccacaaccttttggtctatattaaaaacctactgaaaagtaaataatttgtaaactttaaccacatagacaaagtgcatgaaggggacatggagagaataaaaatctcttacagacatatgtttttccagtgggcagctgctatttaagaacttttaaggtgcacatgagtacacctttgttaaaaggtatagcttgtatagtaattccgttctgggggttgcggagaagagcaggagggagcacagtgtgccttgccctggctggcagtatgagacaattaccacgatgaggttttttttttaatgttctccatatatagattaaaatgtttgttgcctgaactgggcatggagaaggcatcataatgtgcacctgaacattcatgtagggtttagtgaggagaaaataagaggataccctgagctcacattcatgggcatgggctcaagctttttccaaagtcactgagatgtcattgtattgactcagccttatttgcattacctcattctggtagaactgctatgtttatagacatcatttggcatttacccttccacatcagagctttcatattggagttgactcttcattttgagttgaccaaggtgggcttcagtgtgagtgagtgtgtgcacttgtacagatacaccataatctaagaatcaccctacccccatgaacagggtgtcacgcatgtgcttgactgtgtgcttctacagtggcaggtagagtgaatgcagtgcaggaaatatcagcccttttctaaagcactatgaaaatgaaagggggaggtggttgggggatggagaggacagagggggaaatcacttctttgtctaaaagggaaatgccaggaccgtcccttcaggtctgttaagtgtctataggatgaggaggaaaattcttcttctcgttgacattgtgtaggtctgtgtgtatctgcatatgcctatattcattatgactcatcatcttactctcatggtcttttggagatactttgtctattctggagtgcagaggtaattaacttatggtgccagctccactgatatccaaccatatatatctttggatttttgaaaacctgatgtttgcaaatgtctattattaaaaaaaaagagagagacaaggtctcactatgttgtcaggcaagagtgctgtagctattcacaggctcgatcccaccattggtcaacacagactgctctgtgtctgacctgggctggttcacccctccttaggcaacctagtggttctctgctcccaagaggtgatcatattgacatcaaactgagtgtggacacccaattggcatagcgcactacagcccagaattcttgggctggagtgatcctgctgcctcagcatcccaagtagatgggaccataggtgtatacctccatgctgggctacaaaaatctgttcttatcttctgtgcctttttcttgttattctaaaaggtggaaagccgagcaacttcaggatggtgctgtagcattgtgagtgagaggagaatatatttagttcatatggctgccttatgtgtaatggattactgggtataggtccatgtattgttgatctgtggcatgacaggcctggcagagggacacaaacacatatgtacaaaatggctccctgctcattaccacgagcctgaactcatttcagctgagacgaccagttagccaacagcccaggcgtacatgtgacagcttgggtgtctgcccctgctggtcatagctaccgcttccgtcactggctgttaatcagaatatgagaaactctggccatttctactggctggactccgtgtgctgcctgaatccaggtgcatgcagagatgttctcagatctaagagaggtcaggaagggaaagggatgattcctcctcctaccttttcctaagtcccttctccacacatccaattgcacccatgagaaccgaaccaccatgttgaatggggtctggcattcagagcaacttccctacaaatctctttttattggcatttcctccaatttaaccagccctgaattgcatttgaatcagatgagagaaagagagggaaggagaagggaggaggtccctccctctcttggaaaagcagctcacaaccagctttatttggtaaaatgctgcaatagatgcttgtcagaaataatttattcctgttagctgtaatctgaaggaaaacagatacaagtcctatagttaaaaaaaaagtaaagtagtcttgctttcgctgacagtacaaaggtgtcatatacaagaaggattgacacagaccaaggggtcttgtgggaaatatgataataactataaagaagacagattattccccagttgccaacattcaaacctttttacagtcagttcaaacatataaaactttattgctctagcagaaaggggaacaatttctggttgcacagctttcccagggctgggtttatactgtctgtgttattgctctatagtggcattttaaagtttattgaacaagacttttacaattgaaggaagtatataaaactgtaaatttattagatttttcaggataagtgccctttgtagttgtgctcaagaattcggagctatgagaaactgctagttacaagacttattaatattaaagactgagagtacgcacattttataccttaactgatctcaaaaataatattattatattactgaatgtcagagctctgatactatagaattggatggatacacacacataggactctatgtaccagatgtgtttatttttcactggctaaaaagttagctttcgttatatcttactttatttgcttttaacacagttggtcagggtattcctctgttcattgaaggatgtctcaggtagatgttttttcctaaaatccttgctgattttccagcatttctcagtgtgtgggtataatgcaagtacaagtgttaggttttaagagcatattttatggtgaagtaatatattgttgcattcacaaaagcaactataactttgataatcaaaatactaccaaaaggagttcttgttttccccaacttctcatttttcatttcttaaaggttttgagggaaatcatttgagaaattttgtaacatttgtgataatctataaaaaggtttctcaacctcagcactattgactttttgaggccagatgatccttcattatgggggctgccctgtgtaccgtaagctgtttagctgcattcctggcttccacccatagatgccagcagcatccccactcccccattgtgagaaccaaaaatgtctccagacattgccagatgtctcctgggaggcaaaattatacccagttgagaaccattcatctatacagtattataatatgtctggggaaaatacattttactgtaaataaataatataggttgtgtttggtaattaaaaaatatattgttactaaacaagatgaattacaggattatttacttgcagaaatatctgactgttgactgcttttaaataaggtgtttcccccaaagaatgtaacatagctcaatctttaaaatttttcatataaattttggggatcatatcactatgtggaaggagatgccttgcttgcttacttaagcctcaggacatgtgtttatggatataatcacttatgaaaccagacctcatattctttttatattatgttatgattagccactgatatgtgtttgcctttttgatttttcacatgcatatgcagaaacatgtatatgtatatattatgtgactaacacagtgaaggatatgaaaagtatgaagacaattttgattataattttctcatttgacaagttcaattttgaggtaccatcaacttgcctttaattttcaatttgtattctagaattccttaacctcttcagaaggttttcatggtagatacatttaaaacattcaaataagttgtttatagcacctgttcaccttcatgctgcctgatgttattcaagtacctatgtgtgaatggcactttgatctggaattctgtgttaatttgtctagtggccatagcatttacagaaataagctaaaatgttttcaaaaggacttaaattgtaattggccttttggtttttgattgctgagttttggaattctatggttgatataaaaaaaatctagacacttgtgacttactaaggagtatcttgaaaatgtctcaattctgttattcagtggaactaccattctcttttgcccctatgacctctgatggctgagcggtgttagccatatactgtgtgtcttttcacctcttcttgccatctctgtgggtcactgggctcctctggaaacttctgtaggcagggcagaggtttccttttgtgtttccttttagaccatgccttaagaagtatggtgtgacttcctttattcactaaatgtctttctgataagctgtgcatgaattatatgattggaaagcaaatcatattagaatccactagtggagtctggctaggatatccattgtaatcctcctagtaagtcataagatctattcacaatcacccctttagttatgcacggtttccttaaatcataatatatcttgttagagtttttaaactactaatgtccattctagtatggtgatatgtatgatagctgtgtcctgcctggattcatgcagtcacatatatatgatatacctttttttgaacatatgacaatatgcatagcccctatttggtgaactgtcttctctacaaattatagccttggtgctttacaaggttaaataacacagtctctaatttaagtaacagtgagaaccaggaagatttaaacagtctgagtcaggcacacataaccctaccctcaaaagcactcatagctaagtgggggaatcttgctgaagtcttgttaacttcctgggtttcaaagtcccacttccaggtaccatggatgaggcagcaggcatgcaattacagaaaaataaacctttagtcaaacaaaagaagccactgaaagaactgaaaaccccttcctagtcccagctaaattcccagggaagatttaggacctgtgtttgtcctgagttagtggatggtcttggccagtttgccatctgtagtggtgagttgaaagggactgtgggctctggaggctgaaagggagtgagcaggaacaacatgaaacagcaaatgtcagggaagtcagtaagccctgaatcttttatgagaccttggatattctgatcacagctccgctggcatcgagattggaatacagattatgggagggagcgtctgtgacatgaagccctggcttaaatcttcccaaggttttaacgtgccttaccatatgaatattttgttattttatttggcagtatttccacaggaggccaggaaggagagcactgagtaagccaggggtagggcaaatctagagatgggagagattagaacagtattgtggctaatgagactaacaccactgaggtgtgtgtgtgtgtgtgtgtgtgtgagagagagagagagagagagagagagagagagagagaaagtgctgaatcccctgtaatcctgtctcatacaaggccctggtgctaaaaccactgtaactgtttatgaattcactccagctacatagtgagaggaaggaaagagaataagaagaacccaatgctggaatgaatttatgcttaagagcttgtctcgggaatgcagctgggtttaagagtcgccaagccaagacaccctttttgggaaaagggaaaagaaaaggaaaggaagataaaaacccaggagactggagggacagtgggaggaagaggaaagaaaacgtgctgctcccagatggggaagccttgtctgagtgaaatggcattataggttgtctgggtgttagccccttaaagtggtttaatttcccactaaatagagatcactgtgaggactaagaaccaagcaaatgctttcgattgcgctatcttgattagaagccctgcattaaggcaagagcattggcagagcccgagagagctgaggcaccctgaggcatgcagcaaggtccatggcaggctagacttcaagtggctttgccggagcatgacttacagcagatttgatggcctggattttgcttttccacacctgtccccatctggtaggccatgctgtctcgtagccaacctgcaagtcagttaggtgaggccgagtgacctcagcctgatgcaggccacagaagcagagcgaggcagagtgactaagtgactgctggaatcctagtaaagcagggataggaaccagagttcctggactgcacgcagccttttctttggtaagagaggttgactactgtagtagctgtgtaaggggcagatagagatgagtgagagatggtcattcctaagtaagaaatatttatcagatgactgttatgtgtcaggagctgggctaagtgctttacacatatatagtctttttttaaaaaaaatattttcttttcttttaatttagtttcaggggggtacatatgcaggtttgttaacataggcatattatataatgctggggtttgggcttctattgaatccctcacccaaataatgaacacagcactcaagagagtgtttttcagcccttgccctttccctccctcctcctttttggaaaccccagtatctattgttgccatctttacgttcatgtatacccattgtttagctcccacttgtaagtgtgaatgtgcagtatttgattttttgtttctgcgttaaatcacttaggataatggcctccggctgcatccatcaacatatacaatctttacaacaaatatatggcacaggtactgtgattatattatacccattttagggataaggaaactgaggctaaagaagtaaccaagacaaagttagaaaatgccaagtttgaatctaggctatctccaaaatacttggccttgaacacccatttgagcaggtttgcactgaatctgtttcttcattttaagcactacttattgagtgctgactgtatgccaggtaccatggtaggtgctggggatactgactagaggaagacagtgtcctagtccttgaggtgtacacacagccgcggagacaccccagcaaatcagcgatggcagtggtgccatagatactctgagaagtagtcacggtactcatggggcctgctacttcataatgtcagtgacgtggcagacacaggaaggctgcagcacacctaactttgttggtcacttttgtctatctgctactctcaaggctccatttgtctctgttgtgtaactctgagcaagctagtcttctttctaagaaagtggaagctgatcagcagaaggtggccatggacaaaatgggaagcaggaccgctggagaaataggcccagttgcttatttcaggaaatcctctagtcttgttcactcgaaattgtgcaaggacaaagctgggtccattgaaacagaaagcataagaaaacaaaaatagaaaaagggggaaaaacactttaagttgaataaacaactgctgagccaactcatgagttcagcgggggattctcatgtttccaggatattttcagattctgatggcaactcgggaaagaccactgtaaccttgaactttgtcagaggaccgagtttaagaccaccaagacatttcacgcagaccacccactgcaatttcttgcataggtctgctggccagtctcttattaatactgcaaggcaacctaaactatattttgttgggaaagtggaagagcgaaggcaggtgttgaaaagccatgaaaaaaagaattaaaacaaaaatgtgcctcaggctcctttcagctggcagcagaatttccgtcatctttcccttttgaatttgatattattgcaggaacattaccacggactcaattttcacttgacagtgaaataccagaagtcgtctcgggtccggagtgctgtctgcatccagtccctgttaatctgcagaaggaaagcatggagatggggtgggtggccaagctgacacaggcctcttcaggctgctgggaaagggtgctccctgggtgtgaggcccaggagtccctagaattgcatagatgcagcagtgagcagcccacctgggtgtgaatcatagacttgttttgagaattaaatgagcaaatttatgtagaatgcttaggtcagtgtctgacacatacaccagtgttcagtgagtattacctattgtgactgtttcttcgtgggcaaagcaacatcatcctttctctgcagaatttgaaactgatgtcaaaagaagagggaggcagcagcatcacacatcagagggaatttcttttagattcatataccgtttttccattttctcttttcagtttttttctttcttataagaaagactccagatgttgaatttaaactgggggatgtcttcaatgccattgaatatattgagcgtgtaggcaggcagtggaaggtgctggtttttttcttttttttcctttttgttttttgagatggagttttgttcttgttgcccaggctggagtgcaatggcgtcatctcggctcactgcaacctccacctcctgggttcaagcgattctcctgccttagcctcccaagcagctgggaatactggcatgcaccaccacacctggctaattttgtatttttagtagagacggggtttctccatgttggtcaggctggtctcaaactcccgaactcaggtgatctgcccgccttggccccccaaagtgctgggattataggtgtgaaccaccacgcctggcggtgctggctttctttggtaaaacggagaaaagccttgagggtttaaggaggagagaggggagtaaaatagagaagaggatcaggaaaagaagaacaagttgaggatatttaattatttgaaatattgtgaaacatgaatattgatgagaaggatgaacagggatgactaagtgcaaggcagggcgtgatggcttaccttcctccaagtcccacctgctgttgttgaccccatctggccagccaggcgtgaaccttagtctagcaacaataggggcaacacagagtgcatctgctgctcaatgcagggagagatgcactcttcatcttgtaccttcttgctgtcaaccctttctctttttttcttctgctcatttcttaccactctgtttatggtaacatttgaggggggaaaatacatcaccctatgaaagaacagggtggctgctgactttgtaccaacagcagtgaaccagggcctagttgtcagcaaccaagacctctgctgacccagaagcagacaggtgaccctttcaccaaaacttcaatcatcagtcttctcttttctttttttgaaacagagtcttgctctgtcgcccatgctggagtgcagtggcgcgatctcggctcactgcaagctctgccttccaagttcacgccattctcctgcctcagcctcccgagtagctgggactacaggcgcccgccaccatgcccggctaattttttgtatttttcatagagacatggtttcaccatgttagccatgatggtctcgatctcctgacctcgtgatccacatgccttggcctcccaaagtgctgggattacaggcgtgagccactgcgcccggctagttttctctttttgtcgtgtctaccttcctacttgcctcacaccagtcagttggctttctgtgtcaagcctgaggaatgaatctcatgaaagagcattgggagagcggagattttggaaattgctttcagaacacaaaatcccacatgcgtgggcttgttccctgcaagcttaatcttgcctgatgtatatgtgtacatgtggaaggctgaaggaagtgctataaatgccccattcgtaagtattcagccatcgtgtgctgaaagcctgccgtctgccggacactgaaatgtggccttcacaggccgagggtctttaagaagcatggccgtgggggctgagagcagggtggggtgacaggacaggttactgagactgaattttgtctgaagagtagggagagctgtagtggttcccctttgctggttgttggtttttgtgtgcccccccacctcaaacccccccaccgtaagagaatcagaagggtcccatctgccttgcagggaagggtcatggttggtgactggtaacatctgggggaggggccacttcattatgccacccagaatatcaaagcagcttaggcgttggaacccagggaaggaagaagagattaaaaaaaaaaaaaaaaagccccactgccagtcgggcagctctctgtctgctgtctgcaggctgctgctacccactcgttacaattaaaatgaagtgtccgtcagcggctatcttctctgtgtggcccatatgtttctgagctgatactgtccggattattctgttcgggaaaacgataacggctgtttataaccttggcaaagactgaggcctaatcaggctggagcacattttcaccgactggctgataacaggctgttagcagccttatcgctcgggagagataggccaaaataagcagatctgtgagcacaggagcccaatcgagtggtacacactctggccctggctttatttttagattttcctttcccggttgatatcggaaggcacagaggcaggaggtggggtggatagtaatgtgtgcccccttgggggtcagagtgaggtggagggggatgttaatcaccatgagaggcagagggtcagcccagcttccagtgctccgggctcccttcaaatgagggaaaacacgtgcaggtcttaggagacaaaggaagggaagtgactgtttcctggcctggtgtgtgggcccgttgcctgttccgttcagcgtctccgtgcagttggactttccacctaggcaggcaggcataggtgtgcggttctgaaagactggtctctttccacattctctcctgctctagggactgacttttgctttctgtctaaatccattttgcctggacgacgacttcatggcatccctccagaatgacttgccctgcccaactcatcatccttacacatgcctagaggccagatgatgggttaggctacggggaaaggagcacaggcaagtcttgagtgtggagatccttacagtctccttacattgattgaggctcaaggaggatgtcagcagaggtcccaccaagtcattcgttaatgactgacactaaacccctggggaggagttgtaagttttcagagaagtttctgcctcttggtaaaaccttcaaggaaaggccctttgaacttttctctatgtagtgatagagaaaagccaaacctgtaactagcctttgcttctagatgtaattctctaaaatcttgacctccaacatggctctccaacagctatgataaaaggtatgtgtaggaggtcaggaacatgtgattaaaataaaaacaggtaagtttccaatggtgatagatagacagcaagtgtcataaaaagaaggggaagattgaagatattgtttgcattaaaaagtggagtcttgtattttctccacattctgcataaaccttcctatcttaaagtacattagggtttttactctctattctgtctctctccacccctcttctcccccttccttccatcctctccttgctttctgtacagctgcctgattcgtgggtcactttgtcttcctaagactgaaagaatcaggtggtgggaaagaggggaaaggaacccgtgcatgggggaggggaggcattttcaggggcacacagattgaagtaggcacagaaggcagcagaaagcattattaccattatcatgctaatctatttacaaggcccttttattcattaatctttgaatagcagaactgttcatacagcctgaaataagaaccacctgtgcctctaggaccaaaaaataaaagtattaaggacaaatgatatgtcgaagcaggaagggaaaaattaaatataaacaaaaggattcaaagccatttcttctgtcatttagatcgtcacatatatgatttcacagctcacgtgttgcaaaatggccagctgactggcaatttaggagacatcatccaagttcagagaacagctctggggagggttccaaatgttgtgaaattattaaacagtttgtttttaaagatccaaactaaggtttttctacactaattcctattattcttttttggaagtaagcactgataagccaaatataaatgattttggttaatgctctagattccctgattaactcaataaagaaatcttttatattgtcttcacagaattcatagtaatatagaaagccaaagccggtagggatcttacatgtatgatctagttcaagcctctcattgtctattaaacctttaattaagagttctttacatgtaggctaagcccccgtttgtcacatcacacataggtgagttacattatcgttggaacagttattcttacagggagcaatgtagttcttgcaaacacttattaccctgtgttatagatacttagcaggggctgaagggagatgtagggaaaggctgcagccttccttatatcattattttaagataggagagataccaattagaaagtccactgaagaagatatttaggcctgagcatcttctaagaacaaatgcaataatagccagtggaatggaatagcttccatattcctttaggtgggactttaaattctctcaataacaattcatattaaacgtcattccctttgtcaagagactgagttctttagttctgaccaccaaaccttactgttcacaagtgttagaattatgtcgtcctagagctggaagaacccactctgaagactacccactcattttgtaaagggtattagaacccaagaaaggggatggacttgaccagtgagtctgaaccaggactggagctaggatattctaccttctagctcagtgcttttgcatctttttgatgactattttgtgatttagttctatgatgaagcattcaaaataaatcccttaactgtccatgccactgtttattcatctgtaaaatgaagattgtaatttccccattgattttttttttttttaagttcctcaagagctgggactgtgccatccatctcagtatttcccaaggcacctaactcataaagtgctctacacacagagctgctcaataaatgttcactattgaatagttgaatgaatgaatgaatatgacttttaattgggctttgcaagtgatgactccttcagaattaaatgatttttcttctaagttgtgtgcacattctcagccattcatttgttaaatatctttcaggagaaacagtgaaaaatgatgatgatgtctttggtagtatatggaagacctttcggtactgcagaggtctgattataatcatggagttttgttattgtcatttgttttctttgtagttggttgttcatgaagacctgcgaaggcctagtgatcttgagggtcagttgattttgaggttctcagtagcaggagttggtgtattcttagctgcccaagaaccctccccagcatattgctatggcattcttgtcatttgtcctgaagaagggaagagacaggaccatgctgggggaccttatctatctaactcctgttgttgtctagtgcttagaataatacctggatcataataggtatttgataaatagttgttaaatggataagtaattgctgaaggtctacttttgcttgactagctcatgccttcaaagtctataactggactggatgactgttctcttctaaaataggattttgtgaattatttgagtctatttctctgactcagaagtctaagccgggataaactcttcctctcatagcataaattctaccagttccttaaaaatctgtatctttgggtctataactcgcactggccaggaccatttgtattccacgcctcctctcatgcctacactatgagatgatggcttacaaaggcctattgcccacttatacttctcaaagcagccattcagagaggtcagaatttaaagcagagattattttagtggggaggtggtgaggagggttaacaaaattgctgttttattggatctaacttgcttttcagaagcacgtgactggcatatttgggtcattaaatataaagacattctgcttatgaattatgccagcaagatgttttcagatcatacaaaaacaatgtgtgtggtgactgccaagtagtgtttttatgtgtatgtctgtacacaccacccactgatctatgcaaggcagtggtgctttgcactaaatgccacatcgttccttctgggatctcagaacctttcataaacagtcacttaagactctagtgagttaaataaataataagatccttacccccttgaaaagaatatgtagcctacatattgaaaaattaggcaatttagcccaaggcagaatgagcagagaaagcatgacctggtgagccagacctaagtgccagcagcaagaattttgatctgtaaacattctgatgatggcagatggcagtgcggccttgagaggggctttcagtcaatctgcaaccttttattctgtacctgataagtctctggtactgagttagaagctgtgaaaggccaagtgtggtggctcacgcctgtaatgccaacactttgggaggccaaagcaggaagttcgcttgagcctagtttgagaccagcctgggcaacatgggaaatgtcatctctacacacacacacacacacacacacacacacacacacacacacacagaaatacacgaagagaagaaaaaaaaagaatctattaacgaaaaaataaaagccaaaacatgcatagtatctttcttacaagacctaaaaatcatcctttcaatttgttgagcacatcctgggtgccagacagttcaacatggaacataattaaaacattaaatactggaatacagacaatatgcagtttcggagacagagagcagttaagtttcagggtgtttgtggtggggagttgatagttaagagaaaggagttgaggctatgaactgaaaaatgggcacggttgaagtcagcagcaggacattatatttgagaagaaccaaatacacgaacgcagaatggtcagaaagaggacagcatttttatagccattttctctgcatctcagtttttgtacgggtaaaataaaggaagtgatactggttagtagtgtgtcaccaccggaaggatagctgagggtgactaatatgttcatagctgccaggatgagaggctcagtgtttcacatggcattggcattaaggttcttgggttttatgaggtcctgtttaagaatatgacactggaggtatttctttggagacttttatttgcctgtggtgtgttgtgatcagaaccactctttgggaagagagaggctcttcttggccacagggtgggtacagattagcaaatgcaaccatattgggaaggaacgcttgggtgttctggtggcccttcccctcccagactgagctctgtctaggattatcaggcaggtgttcaaataaataatgcagctaaaaatacttccagcagcaactgggacttctgtagctctgagatggtcggagtatgcatttcagctactcgagcaggtgtgcagtggctccagaaacttagaacagacacacccctgacacatcctcaacatggaccaagacctcatttccaatggagaaatgaaacaaagcatttatttcatctagtcttacctggaaacaggtgtgccttggctgaaggcgtcagaggtagagctcaaaaacaagttaatagtcattgtctaggggaagatggtggtttcagagcagtaagtggtattaatattacctgctccctgtccaggacttgttcttcactaagaagtagtacctagcataacttcagtgagaagataatctataataacataataataacaactgttaatatactagcaatcttttattaagcatgtactgtgtcagacaccatatttgttgatttaattctcaaaaagaatatcagggcaaatgacattatccccatttgcgtagattcaaaactgaggttcaaagtaagtaagtatcttgcccaaggggacacatgctttaagtcacagagttggaagtcagatccaagtctgattcctaaactgtggataaagttgtgtttccatttggacttaccacgaatgtggcatgttttaccttcttttttgactctaaatttgccatatacattaatgtgtaataaaaacttgcattgttggcattgcagcatattcaaggtaattttggagaatctaggtgttttgggcaaaagaattcatcatacacaacctccacaaagatagccatgcctggggtgaaaatcttctgccaattaaagcttccagttgtatcacatttaggaactttgaggacataactctgagtggtcagggtggggtgaccttcactaatgggcgttgttcccataggactaactctggtacatataggctcatgaggaatacctgacaaccaggggtatttaagatttgggtgacaaatggagtgttcaaaatggttctgtggaatcactgtgcttcttgttatcacatgagttttcacctggcaatgacatagaagcacatgggcagccaaactctggattgcctaggctttgaggatgagcccagcccacctctaccgcttcgtaaaatcagagccaatgacagaggttgcctgactgatggttgccggagactcagaatgcttttgactctttgactttgtgtgaatatggtggagatattgaaagactcttatcattgtggcaggaattagttttgaaaaagaggtctgtttcagaattttagatttcaaaatgtaaaaatgttgtgacttgcaagtaaggcataattttggtctcttaaaactgaaattgttttcctatttttctagttttcatagtaagtccctctcctccaagttgaatcacactcagctttactgagtaaggaggggctcaccctcaggatctggccaaatgacaacttttggctgattaaaaaaaaaagtgtttcagaattctactcagccttgctcacaggcaatgaccccgtcagatctgataaactgaacaagctaggggctaccaggagctgcaaaagagacctacacagaaatgccagtctgtgagagagaacaaatggttaggatggtgtcccaggagcaagcaactcaatgatgagccatttttctatcactctccttcaggtttaaatctggggtagggttaggagaaattcttctgtctgtgtttcattctgttagaggtagggttagaaagctcatggtctgatgtgtagagtcaattgtggaatgtgaaccatgattctgagtataatgaagttctatgacaaatatacagccagaacctggacatcaggaagtggtagccatttttacttgtcctgagtaaaagctttaggctattaattggctttgtaaatattgtctctacaggaaatcagggagtaggtatatggcatattataattacctgggggcctttttaatatttgtgcatgctctgaatcagaatttctggatacggggaggcgcaggcatttgtagttttggaaagctctccaggtgatgctatgccatgtcccagtgaattgagacctgttgttttagattactgttagtaatgttgtttttgtcttatccaatgaatatacccacattggcacactctttctgtcatcgaatttggaggtgtctgggcactggaaagcacatggggggtatgtgtgtgtctaaagtgtgcgtgtgtatacatgcattcatttgttttctgaggcacacggtctgctgctggccctgtgacaggtgatcagagcaatgtggacatggcaagcctgggcaaactcactcttcccatttcaccctgcctgcaaacagagttaacatcctcaaggtaaagctctgaaatcccacgctgaccttttcgtgaagcattataatcaagttgaacatttccagttttaccacaaatgcttgccccgtgggaaaatacttccctacattttatgacaattgattctgattttgaggaactaatttgtatcgaatgcaaaatgtccagcctcacatggaaactggaaagtccccttgtccagacaggtccaaaactgtgtttttattgtaaagacaggggaaacaatgaaagattgtgttttttgttttagaaaatccttccttcattgttctgcatacttctgtattttattttttttaacagtcctgtgggtttaatgaccacaggcaattttgtggatatctggggctcatgggaaacttcaccatgtctggattctaagctcttagatgccagagcctactggatcttttactgtatgtgaagtcacccgtactgccaaggatcctgaagtgaacatgctgacccctttgagagattcttggaaatatgactgacattttctactgtgcaatgaaagtcagcatttccctccccacattatagttctggccacaaaggaagcaatgcccctagaactctctgatgtatctgagaaccctggaggcttctgacttcatttggaagaagtcatggaaacaaaagctgctacttctcaggctaacatctgctgacataaacagaagcccctcaaggataccttctgccagtgaccaaaccgggggctcaagtgaagaaatattatcattagacctgcctccaggtctagctaatgtcttattcagtatgaatagcagtggcgtttgggcagggaggtgatgagatgcctattaaggtaacagaggtgtccaatggaacattgcttgtttagccttatgacctctgtccaagggagggcttcctctgtactggaactgtggttgacttagggtttctgcggtttccttcctgaggtatatttacagtgactgtgccttcattgcaacaaattttaggttcatcctcttgagcagggggaaggagcctctctcttcagaagcatgtcaggatatctttggtaggcatcatgttctgtttacttgaaccagtgagaagatggccgagcaagcaaggataagtgtacgtgtctataaaggtttcttctaatcctgcgagtctgtaagcattctagggttcatcggaaactgtctactcccatttctggaatttgcctcttggcatcatcatgcagggggctttttctagtcatgctttgtggtggaaaggtcagctgagcacggaggaacaggggactcactgcttttctcccctttgggcccttgagcaggcatttgactgctgcatatgaacctgggagccatggggtcttaaggctttctacttgattctcagtgtggccagaattctgtttagggcactgctccaaatctcggtgacactccatctgtaaaattgggtggcagtgtagtgtgtgtgtgtgtgtgtgtgtattttcttatacaggactggaagagaatggaggaagaaggataatgacttaaaagcgaaaacaattgaattctttgagctacagtgctgtgtcctgagagtgcagttattttccactgcagtaatgctttcaaaaacatttatctagcttctctcactttctcatttgctgtcattggtgtgaaaaatcgagttaccagaaggttcacccatgttccacaggtatgaatactgaacgttttatttagtgtctcattaacagctggcctgtggctcctccttctcggcttgactctgccctgtccagggaaatggggaatcacgcttaaggattagcagggtgcctattttcacttacagtgcttcattcctgtgttcatgttacctattccctttacaaaatatgaatgagtatctttttgtgacaggctatattctaggcactgaggatccaacagtggacagaacacacaaagttcttaccttcatggagcttccattttagtgaaagaaatagaaaataaatatgacatgatataaaatgatacactatcctatatactactaacatcttttaaacccagttttatatcttaccccctgaccgactctttacaggtcctggctcctgggcaaatggtgccctgtctgtctatgcctggctgtcactgattatagatatcttcagggcctaagctcatgctctgcaaccattttctgttacagaatcttcttgctgctcattgaagccttaatctcttatgctgcgatcaatgggtgggcacctttcccatttggatcctcattttttaatccctgctgcctccctcaatgtcatctggttccatttttctttatagactttcaggtctactgtacctgctgattacttagtggagagtgctggacatctcccttaattaattccatcgatttgaaatcccacaaggtttggggtctttagatttctgaagcagctaaatggaatgtctaaattccaaccttttccttctacaaattgttttgccacaaagttactgggagaaagtgctgtggttttatttatttgaagaagtatattaatccacagaagactctgcatgcctaactgggctttttgtatacaaaatggaagaaaaaaagatgtttggatctctctccctctcctcctctctcttcccctcctcttccactgaccatcaagattctgttcctcattcttttctttgttttggtcatttttcttctttgtcacttactttcatgatgcttatccaactaagaccatgccttagcaaccagtgatttcttgaaccctttgaagaagggtatgaacttcacaaagggtgcagaagcactgctcaggactcctttttgaagagcaactgcccagggtgatttccaagaggattcttccaaaccttatagccgtgatcttgttgagttatacatgtatgattttttagtactccctgttaacagtaagcatggaatttctgggggagagtcatcagatgtatcttagggtcatatggtttgcagaaatggtgaactttctatacagaggttcagaaatcagcatggaaaggagctttagagattaggagctcaatgctctcattttataaatgcgaggatggtgtaagggaacttgtactgattgagcacctatcatgtaccagattgtacatgtacccagattgggcattatgcatctgtcacccccaaatagtgaagtaatatactggacatattggacactcctactaaaacccaatccctttcctggcaccagactactgcttcttaaaccaagaagccaaagagagggaagagaggcacagtgcagaggagtttcttgggctaactctttagaggcttatgctccactctacctgctaagctgtcagcagttgtgaacccttcccagaagctggcagtctcgcaaacactgggaggtggccagactggatgtgcttggagcattggcagtcatcaaagaattaatgttggacgagcaggggtggcgggcatatgaaaggggttgcagggagagatagatagatgaatatacaaaccctcagtcatgccatctgaccatctgaggttgtgtgcatggtggaaggccaagaaacacattcagagaaggggcgtggacttgtctaaaaggacgttttcctttctgcctgggccagccaggcggcagagccctgcactgcctgtgactgaggaagactctgttgctatgcgccggaagcttaattttattattgctctcccctatttaatgtctgtctctcaggcagctggtgatgttttaatgaagctggaattgtatagtctgtagcgctggataatcataagctgccgagtcagaatcaaattaataattcatgaaattaaagtgtataattaatttgaactgtgcagatgagaagaagggccagagcccacagcctggaaggagctgaagtgtggggagtgtttactgaactcagcttctatttccaaataatataatctgcatgcaggttaggggtagtctgtgggtctacctgaacacgtatgcttaccagaaacaaggttctttcaactaaaacctggaatgactttcttagaagttcaaaagcattttaattgattttgatttacccttccctggccccaaaagaatgttgtttgaacagaaaatgtgatactgggttacaagtctttgttgcatggaggtcctgcagaacgtgccatcagaaccgttgcttctgcagttcaaaaggtcgtaagtcaaatccaaacattcaggaactctactgagcttccaggcccatggatttctcacccgtaagtgctctttctctttctccctctctcatatatgtatgtcatacaaacagaaaatacaaatgacttctctagccaggcttcccttggccactcttttggcttccctgggccacaatggaagaagatgaattgtcttgtgccacatataaaaatacactaacactaacaatagctgatgaggtaaaagaaaatcacaaaaaaatcttataatggtttaagaaagtttgtaagtttgtgttgggccacattcaaagctggtctgggccgcatgtggctcatgggccacagttggacaagcttgcgtctagacagtgttaatgatatgtttcatgtctaatatcttatttttcttcacagatgcccattgcaatagctgcagatttttttttttttttttttttttttttttttttttttttagtgcccattctagtagcaacaaaatgaggggaaagcaactcaagtgcctcattaaaatggggaatggtctgcaatttctaaaccactcttcctttcttgtattcctctttcaggcaaatatgcagcattcatctttgttgcctctccaggtgtgagaggcagtgtaacatccaggctgtttacataacttgcggagtgttttacaatgtactctgcagacaattgctcggatccctttattgtctttttaaagatgcctatacaggtgggtcctttttcggtttttgaatgatggatgctgtggtatcataggaaaaagaggaatctctgggttagcttttcattagaaaatccttgtcatgtttaagctcctaagcaggcagcttgaaccccccacccccttcctgcatccagtagacttgcagggaatgagaaggcaaaaccagcatctgtgattgtccattcttctttgtcaggcctttcagagttcctgttctagagggacaaatgactggaggccatgatacagactaatggtgcataagcccccaaaggtttggattgaattgaggctcagctgacttcacatttttaggtcttcagtatgtttatttgtccctcacatagcggcttgatctgtctgcctgtgtgttcacatagttaaccagaaacgctaggaggaagttgtaccagtgggatacctccttaggattcaagggcctcccgtgtaaccatgttctgcacatcagctctctttgctcctctcttgatctgcgtgcttcccctaacttgcttctgcttgcatggccttatcttctctaacgcctttctgcttccgtacaagtttcagccactggtggtttgccaaactggctgattacccataaacacacaacatggttctgttttgctcctagcaatccttaaaccattgcatgtctaacattctcagactaattcacaaatcagaaacatctgatgcccaacccataccaaatgcatttcagggcaaaaattatgctcctataatgtctggcttcctgtcttcaaggcactttgcttacatgactgaatcctcactgtgaggtgtagctatccatcatttttgagcaagaaagccaagatggataaataagtgacttgcccaagacaactagagtggttggcaccatgatgggattggttgtcttatttttcagttggtacatggagtcttcgatgaccccaggatttggaaatgaaatttaaccaccttagagcttctggaattttcttctcttgtgttcaactgaaagtttctgactgccctgggtgaattagatgttatcttactggaaaagtgttatactgcctggtttcttctataaccattttaaccttaaaagcttaatctgtttttaacaaaattaaaaataatttgtagctatagtggaatgatcagagtttgtgcccagtgtttacctgtgagcattttctttttgcatacaaacgttttggtcaacccacggttgcctcctccaggaacagaatcttttgattcaaatacattgattaaaatttacagagactatggtctttccctgccatgggtttagtgtagagaaaatgggacaggatgaggatgatgattcctaagtctacttgtacattacttgaatagctagacaatgaccctgctggcccagttattttagccatgcaaacagtgattagcaaagattgccacgtgatctgtttactcaatcatgtggcattcagccataaatatggctggaaccaatgaattaaccaaaacatcctggtcacatctgggatataaatagattcatgctaaagccacatcagggaattttataaaattgtaagcatagccacttaccacattgaattagcactacgcttgacatctattgagtataaaatagaggtctatggagtataaaatggtctttagaaagtcttctgggaagataagtatttcctataacctataatgacaaaataatgttttactagtaaaagcagctctgtacctcacactgtgaaacaattttacagttcttcaaaaaagagttcttcaagcacatctaggggatctagaggcccgtctggaacatcgaggttccagaggcacttctaggcgaaatggcattgtcagaatcccttcatgtggaggcagaattggggctcagcttttgtcttagtgctgtttttacccccaagagattcacttatgcttccataatgcaggaagaaaccttcgctttggttttctgtgttccctcagctactatttttgatcacttcattttggtgagatgcttgagcagtgcaatatggtgttacggttttgctggagctcaacaccaagctttgtcttttattaagttacacacccctagggatgaagatgttgaccctttagcatctcctgagttattgcattcaccccttggcatgctcataatgaacatgtaatgaaattcagtaattaacttacttaatttatgtattcatttaatgtgtgcccttaatatctgccttatgatctaagaaaatctctacaattctgttgtttttgattgtaagattctagaagacagggattatgcctaagtagttctatttaccattcactgtgtcacattaataaaactaaatcaggttataattcagaggaatgtaattcttatacaggagattttaacagtttgtaagtactaacatagtttagaaagttctgtaatttggagcagagtgctatagttctttggggtatgtcttctcttttgcctcatccacttgccaggtagcagtggctttttattcttaagtcttagagatgcatttagagttacatacagacatatggtggaaaggggtcttgagttgatttggggcaaaaggcaaccgtccccatgcactagagatgaatcatgcctacctccctttgtcatgggaagtggcggccactgccacatctgctatgaggctcttcgccatcgttggctgctggaaatttggatacaggtaaatggtatataaggcttctttttgcttgtgcaccagaagtctttgtcccagcctccagatcagcagtcagtactcccctctcccaacctgtaggaagtacttgtgaaaagttatctatccctggtctgagtgggaggttcttaacctcattgatgttttagtgtgacttgtctacatttgtgtgctcccttcgtcatctgcagaggatatgagaaaagaaacaaatgaacaaaaagtggagatagcgccttcctattcattcttcatttggtatggttatagttaagagaggtgagccaggctgggcgtggtggctcatgcctgtaatcctatcactttgggaggccagagtgggagaattgcttgagtccaggagttcaagaccagcctgggccacatagtagaccctgtcttaattaaaaaattagccaggcttggtgatatgtgcctgtagttccagctagtctggaggctgaggtggaaggattgcttgagcctgggagaccgaggctgcaatgagccatgatcgcgccactacactccagcttgggtgacaaaggagatcttgtcttaacaaaaaaaaaaaaagagagagagagagagagaaatagattggtgaaccattttaggccttgcttcttggagaagtgagcaagaagcccacaagtgttgaaaaggttctgcacaaatgtgctcccatttcctgtgcaaaccaataatttgcttgttttccaaaaggatagaagtaattcataattttcagaaattatttattatcattataacatttccccacaggcagcagatagcccattattcagaattataatgtattttgatttagacaaggccagaataatgaaattggaagaaatgcagaaaatatgggcattaatgttaactaaacatacttcattcaacagaaggagggaagctttctcagccaaagaattattttcccaaaaatgcgtatataaaaatttttttattcagggcctctggtttttaactttataacaccggttgagtaatttttaactgcaggatgcatctctttcccgatattctccccacccaccgcaacatatttcagtttaaatggcctgttatttttcttcatagagctgtgtctctgcatgggtgagaactacaaaaccagtcaggaggaatttgatacgccaagtgggccagctcattataacttctaggaaaccacaagataattgtagggttactgctggtaggctcctcagcattgtgttaggcgtttatactcttctctgttcaacttgcaatagccacttctcttttcagtacattttgtaggacatctgaataaaggtggttgacaagcattttcaagcagaattttcaaggcagcatccaggaatacttggtaactaacctcagaggtttaaaaaagtaaaaaataaaaatatgtggttgaattcttacagtgagtaggaaattaatcttagactgcctgcatcaaattgagcctctttattgatatgaagtgagttttccctaaatgataacctattgagagatctgctcactatgaaatggacagattctgcttactgaattaccttctgctatttatccttgtgcttctttttttccttcctttttttccttatctttatcatccaaaaacattttgtaagaatttatttatgcaaattaacacaaacttttaatatggatatcaagatttcaaagatgttgtgtaaatatgtatatatacataatatagacatatacatacatgtaactaataggaagcacttatttggcatttactacaggtatatgctttgttctattctcaacatgtttcaggcagtttatttaaccttttgaaagaagtagatatggtaggtatattattatctctcttttacagttaagaagaacctgagtcctagagaggttaggcaacttgctgaaggtcacacagcttataagtggcatatttaatcaacctaggcaggcagtctgactcaaaagtctgtgcttttgatcagtacactgtactgcttctcagtataagtataataagcaaaagacagataataaaaatcattataacaataattaatataataagtaaatattactgaatatttcctctgcatcaggcactgtggcaagcattgtacattcgttgtctcatttaatcttcccaataatttgatgatgttgattccattttatcccacttcaaatatttagaaacagacttagtttctaaacctgccccagtgttatatagctggtaaacagcagagccatttattgttggggtaaaccctggagggcttcaggatatctgaaggccaccataaatcactgtgagagtagcagaaggcaatggaagttagggatggcaggtggatcagctggttagagcatggagttagtgaatccacttcttgtcaattagttctgccctattccaagaatacagccatcaacagttagtcccagagttggtggcattgttggggaaagagattgcaatagactggtgcagatcagttacctgaagctcctgccttatctgtggcctggtgatgctgctgtgtgcccagaagccagtcatatggatgtcttgacctgtccagcacacacctcagtagtaggagatatgggtctttggaatgctttatgtgtgatgaggatgaaacagttaagtgctactttctcatcctcggccttatgacattagttagttgtgtaagattttgcagggaggtattccctcctctaccctttcgtcacaagcccctctcattcctctgaaaaggttccatactccagtccctaccctcaaagaaagattttactaagcaaaagtatctatggctctctctgttctccttgctttagctagcacagctaaactgggatctcaccagtctgacagggcaacctccaagattcacaacccaggaaaagtactgctttgcgtaagtttaatcaagaccagagcagagacaggacacaaagtcaaaagaactcagtcagctctgtccccttggtgctaaagaagcaactagaataattattcttttacagtattttgccatattttttgtctttttaagatttgccatcacccatctgtagatggtggcattttgggtagtttttatttttatcactatattttactgcatgtttacattttctttcatgtgcatgtgttttgttgtttaatgtgcaaaaacataatgcatagaggggtagcattcatcagaataaggtcagaaaaatggaggactccagtgttttttgcgattgctttccgtgtttatgtgtgtgtgtgtgtatgggcgcacgcgcatgcatgcatgtgcacacttgtatctgtgtttctgacatatgggcaacaggtctactgcaggctggactccctctctgtaggctctagggacttctccataagaggatgacctacttgacctatttttgcaagtatcttttgccattttcctaccctctgcttccctactcccatcagacatgttaatggctcatatcatcttctcctttcatcagccaaaaaaaaaaaaaaaactctcttggcttctcttctgatttcagcctgtcacttgatgaggtccctgctatttatatttttgtttgttagaagggagcgggggaaacataaataaagcccgggcaaacccaaccaccctgctggatatgaagggactccctcatattgtggcagcagggctgcctaactggtatttaagcagggaccaagaggtccacactgtgaatgccgttgaaagggttactgggaaatgcaaacaaaaacaacatgcaaatgaggctgccagcaacaggtagacttaatcagatgctgtcagatgaattcagcatctccccgattgtcgcctctctttgcctcccattcgaaagccctcatctgctccagatgtggtttaatttactgcgacttggctaattactgtaattaaggattaattactgttaattactttcacataaactcaacgccagtcaaagagcagagccttatgaagtctgccacagaagtgagcatgagctcggcggcctgtgtgagctctgcaggtctctatgtatcgcctgggcccctgctgccacgaagcttcctgaccttccagcatcaccagtgggatgggagttcaaaggtgggagaggggtcagtgctcaggccctcatagtgcgtcaactaccaggcactttcctacacagtgggcagccagaagaacagggacaatgttggggagagggcccggacaacctggacagtgatgcacgaagcaccagcctttcccagcaagtgtggaagccagtcttttattctttctctggtgctacactgttggctttgtgagctagtgaagccaacattctgtgttggtgctgaggtatgggagatgttcaccacaggtaattggaacagaaataaacttctctttttaaaacatggtcttatttttgaagtaaggaattgataaaaggatggttactcatactgcgtgtacctaattctacaaatatgaggattagtgccaccccaaatacctgttccccaacttcacatggattctcagttttgccagttaatgttttcactttttctagagaaattagtgactgtaggactattaaaaatgttcccctttccttaattcttgaaatcaatctccttctagcagatgacattgccttctagttcatggaggaagtggaatcctttaatcttgaactttctcaatctccctgtacattttcttcaaatgtatctattaggttggtgcaaaagtaattgaggtctttccattacttttaatggcaaagaccgtaattactttcgcaccaacctaatacactttttttcttttctcctttctcagtaagaatctctctgttctgcataaagatgattcctctacctgtacacctcataccagcctcctgtcttatctgtcatgccctttgatgtttccttctctgtagccgacagacattctcttccaacctagagaacctacagaaattacagaaaccttcccttgactggatctttcttagctatatacagtctttctcttttttatgtcgtctgaattctcaaagacagaaatctacacttcctcaacccactttggtcttcctttgtctccatctttgactgatatttttttctagtcagtgtcaccaggactccacagttgcttaatgcaatgtatatttttcagtcttgatcttattgagcctctttcttagcagtatttgatacttcatgacttctcagaagctctactcccttgacctctgtaatcctcggtatttttattctccctattgggcatcttttctcaccaggttctgagatattgatgtttctgttgagttctgacttcagactggctctgcatggatctcattctacattcttgttgagggatcccatcactctcagggtgtttgtgactcacccactagactgagaacttcttgatgtcggaccttgtgactcattcattgttgtatcccacaaggacagaatgccattatcaacacaatgggtccctcctgcttgatggaccatggaaccttgggtcctgtgcatctctgtgaaccaccaagggtacatagggccttatttcctgtgtcgctttcacccttgcacaggaggatttatctgctgggtatgagacaggtctttgtgacattttaaaaaaatcataggactatactgtttcaaaggaggcccaaaggaggtttgaatagcaaaattcaaacagtacattgatggtacataaaaggaatactgggtatactatgtagtatgtttttgttctatatactaaaacctgtttacctgtttgcacataagtaaggctatcttcatattgactagatgataaagctcaagtgtaaaggaaaccttaatttgggactaaggaaacagggaaattaagtttttaatatatccaattaaaatttttaataaaaatgtttaacagtcttatatttgaattaattataagattttttctgttgcattaaatcattttatatcttatgctaaacttgaccgactaaaagaaaacaacttttatgcaattaaactatttgttttttaaacagacccttttgtgtttgctgaatcggcagaaatgttctactaatttttttctgtggttgactaattagcaaatggattgctgggctttggcgtatgcatgcacatatttacgtaccaaatattgctatgttgtgtaagtgtggattcattttgtatgtgtgctctgtatttttcactacatgtttgctgactgtgattttaatggacatttgaatgcatgtgatttcagtgggtgtgcactttacatacatttcaaatacgttggatcctaccactatgtactttggagttatctcctttctcattttctccaagaatttagttgtaagcagtatgttactgaacattcagattcccagtaatggcttgaaggaagcatttcttgtatacaatgaacccgaatcaacttctgtgaataactcatttgcatttttaaaatacagaaaatataaaaactacaatactaaattagtcagctacaacctattatttcttgtctgaataattaattcacaatttgaatttctccctgaaagtgatttttgttttgcaagccatcagatagtgtgcttgccattactcaccaagttctaactcataaagttatggattgagtactctttgccccatatatgaaatggatataaatggtttacttaacaaacatgtatggagtgcctgctgtatgtcacacatagtataggccctgaggataatatggtattaaattttctgtggtgatgaattatatacactatgataaaattaataatacagcattacaatgagtaaaaattattgtttgatatattgaacagttgtttctcttgtcgttatatttacttaagtgcctggacagcatgcaaggggggaggaatagaaagatgaaattttatatgatggtactgtgatctggagagggaatattcatacactaactttctgctattactttaggaatatctctgaagtaaagaagtatggaataaagagataatattatgacttattattttccaagctggatagataagatgaaaagggaaacaaagaatactccaaatgcttctataatgcactttcaaaaatatacatctccagctaaaatttaatgtaaatgcttaatttgcttgattataggtattatgcagttatttacactatactgcgtaagctatagtgctctatagttttagctcatctataatgcattgataatgtaaatgtattcatacttttatcaccacaattatttgaaaaaatcttgcttttgtaaaatgaactgtttagatagaagtatccattacacttggcattgtaagaatgtattgactgcttagaaagggccaaaataaatatccctagatatgcataatttatatatgagattaagttatatgtattatgcgtctataaaacatgtatgtttttgctgtcgcagatttaatgtaagtatagattggtattggtctgtgcctacatgtatgtgctccatgagtacagaatcagggagttgtatataaaggcctcattgatgatagtgggaacaaagctgaaaagagagcaattgagagagaaagagggagaaggaaagagaatagtagtgattaagctagcattgttctatacagatcgctagctgcctgctattgttttccagcatttgaagatgaaacatattcatttagctttcagaacgaatggctttaataagggcagagcgggagaggtggggtaacactgatgactagagagacccatcaaggctccccctaaggccattccgtcagtgctgaggaccacatgaccattaactctgcaatcaggacaagttttcaacattccggggtatccttcaatggcagaaagagtcatttggagtcaagagaagatgtatatcagcagtaattggattctggccaaggctcttaagacagtattatctatggtgagggaacagggaggggctggacaaagcatgaggcatgtgattcaagccatagctgagagagcagtagccactacaggccacaggctgccggcacaaagagcaagcagtttgtttgctcaggagtcattgtggcttgtctatggatgtgagcaatcctccatctccagcagaaactggcttctgaatatcctgcaagtcaaaacgttgggctcaaaagatgaggccatcctggttgcacttgactagacaaagctattgaaggcctgaaagtgccccatccagcctcttcccactgcagcccctctcccctcccttcaccctgactacttcattacaatctgccttcaggccggaattgccctgcttaagcctcaaatcattataattaccattattagaaatagctgcgggggaggcattggaacaccaagtaaaaatgtgtgagtgtgtccgctggccctggaatcactctttttgagctcgggggaaccacaaggcatgagggttccaccaaagccagctaatgcgacggctgtcagctccactcaccccacctgtcaagagggggatgcagtggggttcatttttttaattgacaccttcctctctcattccacgctctctcgtctcaacctaattcctcctttcatcttccttcttttctctgagaaaaattcattcctctgttatttgaataaagaaaagggaaaaagccacagaaggaacaatgacatatacattatcctccagaaaatacatagattttaacaaaggcagaagtcaggaaatgcaccaaaagtcagaagaataattgtgaagcaaatatgaggcagacaagatggacagatggaggagagagatgtaggaaagaaagccagcaaaacaggatggaaagaaagggggaaggagagagaacatgcataaaaatcagagggagaatcaagtagagaagagctagtgagagtactgtgtttcttattgtctagtttacttctagtccttctttaaatgaaggctagagtttcactctattaaaagaaaggagagtgggaatatggtggagccaaaaaatagataacatgtgaatatgcctttgattttcagctcacaagtagtcctttctataggtattcaagagggattatgagatgagataggattcagtgccgttgacagagacccaaggagacaagaaaggtgtgtgtctaagtggattccaccaaacagtggtgcctgagcatcttcttgccttgacttttagcagtcctgagaagtccgcccattttctcagcacctgatggcggaactccaccagaaaagctccaagtacaggccatggactgacaagctttttagttcttcgaatggtcatttattttcagttagattggcacacatcacgttagtagtgtctagagatgtactggataagtcgtctaaataaaaaactaaattaggatgaaattagaaaaatatataaatatatcagagtttttcagtattgatatccattgtttttatttttgatcaatgaggtataattcacataaataattcaccaattttaagtatacagtttgatgagttttgataaacatttttattttattttacttgtttttttctttcctttttttttgtttttttttgagacagagtctctgtcacccaggctggagtgcagtggcatgatctcagctcactgcagcctctgccttccgggttcaagagattcgcctgcctcagcctcctgaatagctgggactacaggtgcacaccaccatgcccaactgatttttgtatctttagtagagacagggtttcaccatgttggccaggctgatctcgaactcccggcctcaggtgatctgcccgccttggcctcccaaagtgctgggattacaggcgtgagccactgtacctggcctgagttttgacaaatatatgttttcctctctccagtcacaatcccaataaagacaagagcattcccatcacaccgaaaggtctcctcatgcccctttacagtcaaccttccccacctccccccaaccggtgcctggcacccactgatctgctttctgttgctatttataagctcttctagaatttcattctttaaatgaaattatatggaatatagttgtgtcatgcttcatatatatatatatggcttttcatgtgtaatctaaaaataatgctttgagatgtatctacattgttgcttggcttaatagtttgttgtttctgagtagtattttattgtgggaatagaccacaatgtgtttcttcgttcatccattgatgaacatttggatcatttacagtttggggttcttaagaataaagctactgtgaacatttgtgtgcaaatctgtgtgtggcatatattttcacttctcttagataaatatctaggacttgtattcccaagtcatacggtaactctctctctatttggagacagggtctctcaggctggagtgcagtgatacaatcctctagctcactgtagtctcaaaatcctgggctcaagctatactgctgcctcagcctcccaagtagataggattataggcatgtgccactatacctggctgatttttattttcaatttttttctagagatgggatctcaccatgttgcccaggctggtctcaaaccccagacctcatgcaattctcccaaagtgccacattataggcatgagccaccacatcctgcaatatatttaatttcataagaaacaaccacaccattttccacagtggttatgcctctaaccccttctggaaggagaccatatcatcttttccatacaggacaaattaaatgaggtattacagatagtgatagaagtaggcatggctgatatataggcttcctgtgcactataaagctgtccatgctcagatgcatagttcaaattaatcattagtcaacctagttaaattgtgcagttattttaaaacaacagaaaactactttgcgaggttacatgtcacagtttctctaacatcctacttgggccacaccttttccaagaaaccttccctaagtaactcatccttacttctcatttcttccactattatttatgtaaattatattgtagacagtatttttgtaactatttagttgtttctagttggtgtgatggcttatttcatgatatgttttggtataggttcaaaattggggaatagttactgggctccatgtaccctgtgtgttcagtacattcttgagtaagcgaacctagtttccagaagctgtagtccagaaaactaccactctctcatctaaaataaaatatcttaaataacacataaggattcccctggcgcaaaccaatcatagacgtacactcgcctgcgatccagtatatgtgtttctgttcatttgcctaaaatgggctccacattcagctccctacctttgagtaaataatcatgcgataaagctcaagaaatacgtggttgtgggttttatttttccacctcggctgctgatgtgttacctagcaggctgtgttctacacagggcttggttctctctcacagcttgtggtaagcgaaattattccaagattcaatgaatacctgctattgagcggcttccctaaccacccaaactggtcttttgttagtggttattgagaggattgtcacagccattgacctacgcaattttacttcaaaagaaatgagcatttttcttcccctttcatttctaaaagcagatatggcaatttgcttaaattgctgtctttaaaagtttagatgattatactttttcccccttgccttttttcttccttttcatttaagcagcacagtgccgtctctttttctgggattggacacggttcctgctgcagggttcatgaagtggttgtgcatgtgtgtgtgtgtgtgtgtgtgtgtgtgtgtgtgtgtatgtatattatctccttacacattagtgttcatttgtctgagaactcttttcagacaaagtaaggctacgttgaactcttcgattaacattttatattttaatgctagggttcattttctctaggccccaatactagaggtttgcgggtgaaaataaaatgaaaatacacctaatggaaaaatctctgtctctttatgtaggaagatatggtagcaactagcctcagagacttaggagtaggcaagataggttacaccttcaagattttatgtctgaagaagaaacagaatttgatctaaatgtaggaagaggaaataaaaggtgcctgtgaagaactaacgctaggaacacagggaagaaagagatgaagatgaaaggttacggctagttggcagaggccaagagagcatcctattcttagacccagcaccttggatctagtttccctgtgttgcagttatctctactatgatgtgcaacaaaccatactgagccatatacttgatgccatatactttatacgtgccaaagaatatgatgcaataaatacattttaaattatagtatggaaaaaataaaaaaaaaatgaaaagactcagttctgtcttcagggaactcacaatctagtagccagactttatccctaatagggataaaggagctgtattgcaaataggccaccatatcagagtggagaccagttgatgtaaaaagcaaacccataactatctttggtgatggtaggctgaacccctcaaagctcagaacccactgataagggtttgtgtaacatgtagttagtatatttactgaatacctgattatgtgccagatattgtgttaggtgtttgggatacaaagatgaattcattaattaattcacaaaatattgaatgtgcatctattatgtgccagacatgtatagacattatcttcgctctcaaggaacttgcagttggtgtagaagacagatatataacactgaactcttttcagtacttaataagaagtactttataatgtagatattttgcttaattctatgggaagatagaaaaggggatcttattctgcccatgggatattgatatttgatcaactgttactagatgtggaattaagatttggagattatcgaactttaaatactgttaaatatggcagcctgagtaaaaatgtaaatatgaaaatcttacaagagctaataatttatgtctgtgtgaatgctcatgtttgcattaataaaggttttatttagtaattgattttccctgtctgccttggcactatgtaggattaatcgttttgcctatcctcgatatggtatagattgtgaagcacattttctaaaacataagcaaagaagttgctcaaggatataactcgaggatataactcaaggatataacccatagtccttgtggctatttgagactcatgaagtgaaggcagcattcgtgggacatgaggaagagatctctggactcatagggccagaaggactttttggtaaaattcctttttcatatgattcacatgtatgccttcattattccaaagaatgtcagacagattttcaggaatataaattgctatttctgttaagcagcctcctcaaagcagccagaaaggtcttttaagtcaaatgtatttcagatccaagagagcaagaacaatggtatactaggtcatatggtcttttggccctgccatttaaatataatatctgtacaaggaagtaactgcaggagtagtctgtatattcctgttggttggctggtgggaaggtagctaaccttttgtttctttctttttcagtacactgctttaataaatggtaacagtgctttaataagtcccctggccatcatcttacttatgatctctagatgaagaccactgtgtgaaactggtatcctaggaggttggagtgagcatgtatgagtgagtgtgtgtgtgtgtgtgtgtgtgtgtgtgtgtgtgttgcttgatttataaaccactgaagcccgatgaagtactagggtgaaaatcacctacgtttccagaggaaaaaaatgtcaccatcaattccaagagggacttgtaaacctgaaactaacagccaatggtttaatttttttaaggtagattttttttttaacatttctaggcttactatattctatctggaaaaatataaatttatgggcaaaaagaaaagctgagagtcgtagttttcatgggagagccaaacaaaaaatacccattattgaaaggcagtctttcagggattcttgaaaagaaaggtaacctttcttattcatagtgcagttacctcttgagaaactgcagattagggaaacctgtagatattttattctatctcaggtagggaaagacaagccttcaaaggcttttaatgacagggtatctgtattacttacggattggaaggcccatcatgtattcaatatcaaggatcacaaagccaggagtggtggctcacgcctgtaatcccagcactttgtgaggccgaggccattggatcccttgaggccaggagttcaagaccagcctggccaacatggcaaaaccccatgtctactaaaaatacaaaaattagccaggcatggtgatgcacatctgtaatcccagctacttaggaggctgaggcaggagaattgcttgaacctgggaggcaaaggttgcagtgagccaaaatcatgccagtgcactccagcctggacaacagagtaagactctgtctcaaaaaaaaggatcacaaaacttggttttcagtacagtagtagatccattttaaaccaaaaagtaagtacataaataaaagacacattgaggccaatatctacgttagaactcaggtatctacttaaggaaattgctatataaaaacagtccatttttagataaccttgtcctaacctccctctgacttaaaaaatgaaattggagagcggctgcttgacccaaaaaagaccacatgaagatcaatttaaccaaatttgggcttttatttaaatatctacagaatgaggttaatagtcctggccagcttgctgcttgaaaatgctagaggcatggcttctgaaagtgactgtagagcggttgacagagatgaatgtgaaatagtaatgaataacttcataatagagcagagatgtcatggctttgcatacagctttgactccaataatacgatccactctgctgaaatggggtcagttcctgacaaacagcaatgtaagccagtgaagaagattcctacagggccagaaacagtgatggggctaagccagagaaacccagctagcctaaagggggtgcctgtagtggtattttagctattgtattccttccgtacaaacacccagtcgatggctacacaataagatggccatgataatagtaatatgtattgccatgataacagaattgctaatgactctattggcctgttttgttcatctccttttctcattgcaatcttagaattttggttgactctgacatgttgaattgtgtgttttttaaatttttttctttatatctttttaaataaggcatcctcaggactcaaggatataatactcctagcccttggatccactagtttgatcttattacttgaaatttacattctactgctgctgttggaagcgatgtgtttccagtgctcacttttgcatggcactatgctgcaccccttagaatttattaagtggtatttaagagaaggtgcatcatcttttatatatgtttccaaaattgatgctaagggaatccaaaattttgtcagacagcttactaacactgtatcagttaaagttaagtctctcagccaagcacattaaaataaaattaaaaaatggtggcttaaacaaagtcatggaatagaattccagaggtgggtcattagggagccaaaggcctttatgaaggggattttctacccatcacatcaatgttccaggcaaaaaggaaggaaggagaagactagaatgggaatacttctcaactgagttagttcttttaagaagccttcttaaaactccagtataacacttacatatatgtacagttatccagaacttagtcctatggctactcctagctgcgagggaggctaagaaatgtaataatttacctgggcatattacttgaataaactggagttctgtttccaaggaggaaaggtagaatggatattggctaggtaactagaagtctgatgggaacttatggacacgattgattagtcttgattacttcacttccacatttgtcccgcagcaccaggagatacaccaggagctagggtcacatgagagggtgatggcataatttcaggaatataagaagacacaggcaaactcttcccacatacttggtgatgggaagtgaaagtcagaaattcaaaatcatgtgtctgactcaagaggggattatatttcctaggtttatttctagcctaatcttgtaactttggaggaatttctcttctctgttccatagttccttactgccttactatgtttgaattgagatatcaaaaatttctcatacttactaccaaagaatttccaaccacaatgtcttagatacgtctaatgagcaaataattattgaacagagcccctcttaactgaaacaacaataatactcatggttataccaacatttttgtagcctccataggtacccagtgcaattcaaattcaaatgcctcattagatcctctcagaactctttaagacagaggtagggtctcatctatgggagaacatcctgatctggcgggatcccctctgcatccccagtagctagaagagtgcctggcacagagtcattgcccagtaaataatttctccccactttcccataggcactgtctactcagggacataagggtcaattcaaaaaagactgcagacgtggcctctgctcttagagagttgttgatcaggaggtagcagataggtaggtaatctgaggacatttttttcagcagcataggcaaaaattgtatatatgtcccaaaccttagttgagctattgggctctcatcttatctaagaagacagtggtgggggtggtggtgggtgggaagagaaaggagggattgcgtcttggttgattgcccgtcacctgccagactctaagccatgtaatacaccaaacttacaaggtaatgtttttattctctacaacagacttgcaaagtactgtttctattcccattttcaaagaccgggaaactgagtcagagagcagcagaacgttgctgaaggccacatatctaatgagtggcaaagccgatattaaaatccatatttttttccgctatgccacattgcctctccaaggaaaaatagcaaagcaggaagtttagactatatagtgaaaaatagatggaaagcatgggccacagattgagcaatggcctggaaattagaattactgaattctctcttttctcaacactgccctgggactttcctttatcatcgcagactgtgtattaaaagtcctttgtaaaggatggagccctatacaagtgatatttcatctatataactgttatagataataacagttttatctataactacatttctacccttataaaattgggttaatattattttttcaccaaagtgctctaatagcatgttggaaagtgctcagagaaccacaaatgatgaaccttttaaacatcaccacttgtcaacgcaggaactgtgtaaagtgatttgaggtcttctaattgagctgcatcatctaaatttaaagcacccaaagaaggtagtagtaatagcaacaatatcagttcaatagtaattagtaataaacctagtcaaccagctacaggctgggctaaagcttctaagcattttctgccagagagaatttactcctgctctgaagtgtctaataaggacattaacagagctgagagcccatctgcgataggacttttccaagagccttcagaaaagtctcttaattctgctgtgtgccttcatatatgcatacatgactgaacgtaactgacctgacattgctgagttccattctccaaatactcttcccagtgcagccagaattaaatcattgagtcatgtgcctctagaggatcgttcctattggccccctccatacatggtaaatatcatgatcaaacagtcactgacctgttgctcgcacatggcccatggcatcacctagagaggcatacgattattttataatagaacattagtacatgtatatttttaaatggctattctaagtatttcaaaatgaagtgttaaattaattttccttcagccaaagaaaagctagaaaagtcagcttttaagtttcaaagtatgtagaggtatgtttcctgtgtttggcatcttggtcatgcaagaggttcagtgcagactgtatagggtatagttataagaagtacctcactcgcaagtctcagttgcttagcatgaaattcataggtaaaagtggtaacaagtagtaaaattgtaaatgtaatttgagaaagctatggtaaatagttgtctttttttcctaaactattcttttttcttcttcttcttcttcaagatggagtcttgctctgttgcccaggctggagtgtagtggcacgatctcagctcactgcaacctccacctcccaggttcaagtgattctcctgcctcagcctctcgagtagctgggattacaggcatgtgccaccacgcccggctaagttttgtattcttagtagagacggggttttaccacattggccaggctgttctcgaacccttgacctcatgtggccaggctgttctcgaactcttgacctcgtgatccacccgcctcagcctcccaaagtgctgggattacagccatgagccaccacgcctggccctttcctaaactattcttatctcgatttttatcagccctcattttgataaagcagttttatattgcttttatgtgaattatctcctatgttttacagagaattccagtggattctcatggttccagtgagtgcatggggtagggctgatggggttgctggcagaagagctattacaagatcctactcttctgatgtagggccatttgggcctcttttgcatatcgggcttcttagtaatcttaagaaaggagttcatgtttcaggaaattcttttgaaaaatcactgcattttttcatttcattctctccagaaatctttgaggagatattgttgttcctattgtgcaggtgaggaattgaggcttaaacagattgagtttccagagagtacctaactcaaaatttgctgagtaccagctctaattctgatcttctgactctaccatttgtgttcttaccactaaatactgctagttcctttttccaaatttgaaataccagtaaatttgagaatgatcttttttaaaaaaataggcttaggctgtagagagtactatgtttgtaactctcctacttatgtaaatttagcatctgtatatgtatgaatcatgtatatatatatatatacacacacacacatatgtatgtatgtattttatatacatacatatttcaaagtacaaaaaggtagactgaagctattcacagaagataactttggtcatgcttatattcttggcctgttatggatgtaacataacagtatgtttctgtatattttgtgttctgctagatagactttaggttagaacagccattgactttgtgtgtccttaaggaagtaactgtgtctctctgaatcttgaatgaccacgggcacactggaaatgaaagtatttgccagtttccacatgaaaagtgagtaaagcaggattttgcttgctgtctcttcttaggctcagggttagagcaactgtaaaataattaataatcctctcatagaaaaatttgctggactttaatgatgcttaagtaatctaggactcaacctgagatactatgataccaaggtagtggctatctatgcattcacagaggaattgtgtctagccctagggtatcctggggctagacagctttagaattttgtttagattggaggttgagagctagaagataaaggtttacaaattagaacagcaacattttttaatccacctcccaattatacacaaatcatgagtatgcatcataagtaaatgatgcatgccaagcagttcatgaaaagaggtgtacccactattcttactccaaaatgatcaagtttagccattgtgataaacagtatgggcaccattcgtgtttttgcttttgagtttttgtttgtcaagccacagctaattatacaagcagactagcaggatttgagatgcaaagtgttaaaactaatagtgtatgtcaaatcctttattaaaaagtacatgataaagaaagatcatgtcacaccataaatagtaattgtacaatacaaaaggtgtgtgtgtctccagggtacgtggagagccagttcattgaggttcgactgactttcctcgcctcacgtttcctgctggcttctagaagcagtcatgtggatcagaggccaagagataattaagtggaaataagaactctatatccggcctctttggaaagaggtagcaaatcctcctaatcaattctgattcctgccggctttgttgcctaaggtcagcttaacagtcattagaagaggtcacggcaggctctgtgatctctatcatctaaggttaaataatacgtcattaaaagggtcaatcagaaaagagcagattctttccctgtgattcacatattttgcagaagcttctggcttggaatttctatcgcaagtttcaaatctcacagcagaaatgtttacacattgcagtttggctgaattcagaggaagctttcctggatctctgatgagaatgagaattgtggtcatgggaagcatatggccatgacattcatcccttactcaagataagctgaggagcaaggtcaacacattgcatcagacctcaaatgaagactggaacatatcaccctaaccgcatgggactaggatggggtgagcactggggcaggagcagtggtgtgtgatggaggggtggaggaatctttctccactccaagatgggatcagaaatgtaggaggaagccaaaaagagcaagctcaccactcttggcatattttttccaccttgacattgatagctagacctcactcctggttgggaaattttctaagctaccaagaataggaaaaaaatcaaccataactaaagccctttgagatattcttccttgtcttcatgaacaggacaatattaaaacattacagaaagtctggaaaacaaagggaaaaaaaagctgatagccctgcccttcaaatatacaactcattgcatttttagtaatgccccctttcagtttttaatctatttgcatatataatatattagctagctaaaattggaacataaacaatatatatcttgcttattcatcttacaacttaatacagaaattttctgttactttattactttttataattatttttaacaactgcttaatatttctcagatagagttttaagtattattaccctacaaataggtgaaagtaatgatgaatagcatttagtatagccagtcctggatagacacagaaagaaaatgatacatttttgtttttctcctccttcaaattctgccaaatgccactcatcagcaatataatagtgaaataaagtccatattcaggtatttgatttggagttgctggagatttttggtagatttaattcttcacatgattaacccactgttattagcaaggcttggaccctttgaccacaaaaaaactttttagaagtacagtagctgggggatgattggatgggtgagtggatggatggatgggaggcagagcaaaagggagagaatgaatttgtcattgatcaaagcactgtgcatggcttaggagaaccgtggaccaagcaggcccgtatagatgatccaccctgtctgatggtgattaccagcatctgacagatcaagaggatgtgggaatgagggtttgaatgaatgcagatattcatcgcttgagcccaggagttccagaccagcctgggcaacattagtaagactgtgtctctacaaaaataaagtaaattagctgggcaaggtggcacatgcctatagtcccagctacttgggaggctgaggcaaaaggatcacttgagcccatgagttcaaggctgtagtgagctatgattatactgcacattagcccgggtgacagagtgagatcctaactccaaaaatcggaagaaaaaaaaaaagagctttcaaactgggggctagttggtgtgtgtgtgtgtgtgtgtgtgtgtgtgtgtgtgtgtacatgcacatgtgcattccctgaatgctcattgctaactgtgtgttggcctttcttactaaaatgcatgtgtatatgtctttgtgtatgtatgaaatatctgagaatatagtatttagaccccattagtgagggtaaaaatatacagataaactatatcatttatgattctgatacggctactgtcaaaataacacagtattttgacagctgctttatctttactctcactgactacaataagaaactagtttcttagcaactaaaataaattctcaatcagagcttaaaaaaattttttttaagcccacaatagaaaaaatagacccatagttggtgtctaggcaagctattcctattgagtgggaatgaaatttatctgaaacattctgataccctttggctggtccagctgcccttggttagcaccagtgggggcagagacagtcagaagtagctttcaggaggcttgggaaaaatgttcattgttctttttctttgtttcagtgggttctttttaaaaaccatttcttatgttatatactaggctagaaagtactataagaactagtacataagatctggaacagaaagcctgcattcagatttgtcttcactgtgacttgtaggcagtggcttatatatcagttaattagccaaaatgatagcggtagaggctggggaagcaaaagagaaatttagctacttcaggcctgttgtgttatgtctttaaaacattttgaaaccccctaaggtaacaatttttaaatagggtctagggatccccaacatttccagggagactatgaggtcaaaagtatattgataatgattttaagatggtatttgcaggctgggtgcggtgactcatgcctgtaatcccagcactttgggaggctgaggcgggcggatcacttgaggtcaggagttcaagaccagcctggccaagatggtgaaaccccatctctactaaaaatacaaaattagccgggcatggtggtgcatgcctgtaatcccagctactcgggagtctgaggtgggagaatcgcttgagcccaggaggtggaggtggcagtgagctgagatcacgccactgcactccagcctgggtgacagagtgagactctgtctcaaaaaaaaaaaaaaaaaagatggtatttgctttatttactctcagtcttttatgaatgtgtacaatggagttttccacaggcttcatgtaatattgtcacagactgaatgcagaaacaagagaatctggccatcttcttttaagtcagaccttaaaaagatttgtaaaaatgtaaaactcactcttctcactaatatatttgtttcaaaaacattttttatagacatgggttatttatgttcaaatgtaatgggtttattgccccccttttttttttttttttttgagacaagagtcttgctctgtcgcccagcctagagtgcaatagggcaatcttggctcaatgcatcctctgcctctgggttcaggtgattctcctgcctccgcctcccgagtagctggggttacaggcgcctgccaccacgcctggctaatttttgtatttttagtagaggcagggtttcaccatgttggccaggctgatctcagactcctcacctcaggtgatttgcccacctcggcctcccaaagtgctgggattataggcatgagccaccacgcccggccagtttattgcttttaaatgaattaatattaaaaaattctttagtctcaaatttatgaatattgataaatatgacctatataaacagaagctatttggagtcctcaatagttgttaagaatgtaaaggggtctcaagcccaaaagatttgagaaacactgcttctaaaaactggctgtctgtacctgtgtgtgattcataggtttggcaaagtcaccaacactatttcctttcaaatgccaagggagattttaacgtggctaccaagaaacaaacaagcggagatgtcaaacagttaatgtgtccatttagacccctttaaggttttgtgtgtgtgtgtgtgtgtgtgtgtgtgtgtgtgtgtgtgccctcagtgcttagatatgcaggtagatagacacttagctcttaagaaaggaattcatctctactcataatttccttctgctggtgccatggcaagtgcatttctgagtaaagtagtctgtgtgcataggtgccaccctaccaaatactgtgagccagattgccattctggaccaagatctgagaaggaagacataggggagaatgcagaatgtggaaggaggagaggaggggattgttaattaagctctattaaatattaattgaaatataaatttaaaacctcaccaactcctgacagttatataatctaattaagtggtaggtcctgttgccccacagtgtcttttggtgtattaggggaataaagtgatcttcttctcataaacactatgagggctttattaatccaaggtatttgccaataaagtagatgggaaaagtggcaataataataattttatggaacatggaagaattgaaggggcaattttgatgtggataggagtgcagtgaatcagctgcagtgatccacatggaatctgcacgctttggcctgtcattggggtaaggaagatgaagtccttgtgtaccattccacatttacatgtatattttttgctcatggagaatgtatattgaatccctgagaccagttttaattttataagctgcctttggtggggaaaatggtaagtctgtgcatgtgtgtgttttataatgaaagtttcaaaagaataaaacctggaagggttgtggagatgaatttgatttcttactagcaaacatgagtaagcctgtattttgcaaattttccagcaacggggctgttggagaatagtgaaaacgatctgaatcttttatctgtgctgcaagagaaaagaacctctacattcatttcttttttggctctcaaaagttcttaatggaaagttaaaaagtgcacaagattgtctttattttttgtttctttgaattatttaataattttaaaaaagtgcacagcatgtagttctgagatgttttaggtggtgtaactaaatttaaaaaataattatcatgagttaagtcagcaactcttagtctttatttttgaccaggctctagactaatgcatcattaatttctctgcataaaagcagggctatttaattctccttgttatcttatttgtcttttgtttgggttttggtagttgttgtttctcattattttgtgtcaggatttcgttatatcccctcattttctattgctgttggtacattagtccccaagtttgtgagatgctatttcagttttagaaaaggagtcccttggaattaaaaatggagtttgcaagaccacacttgacttcgtgcaggtcggccagacccatttgtgagtaacacagcccttgcgtggttttgacctttgatttgtggaaatgagagtggcttctccttccccagggccactgtggctagctgggcttgggggacgagcataatataattgtgtcatggattgctctgttactcctcgtatgttagcaattttattgtggtctcttttatttccttttcaatttgggccccggcagtttcccaaaggaatgtggataaaggctctcagtgttggaaacgggaatgatgcagttgagcagttgcctcacctctgaaggtggcaggagtagccgtgaaaggcctctgagagaagagatttctgtttagtgtggtggagaaggggtcagtactctttgttgtcatttagtatgtatcgaggagcagcgtgttcccttggccactggaagggtgggcttgggaagatgtttatgtatctcggcaaaggtggactgagcaggtgggggacttagagcctgtcctaatctctgggtgatagtgtgtgcccactgccctgctgcctatgtgcccggctggtgtgtggacgggaactcagacccatgtgctcatgggaaaaagcagaggctgggcttcttttgagaacttggcaaaggcttccctgttcactttagagtgtttcttttcttgaagccagtgctggatcttgggtctgtgctgctgacgttttagaacatgagaaagagccgcagtaggagccaagtatctgccagactgtgtcgggagaacctttatcatttctgtcagatacatcacaactcgcttgtcttaccatacatcttcctaaatgtgacagaatattcagctgttattaattgaatactctctaatttaactgcttagcgggagaaagagtgactggtttgtttcaacacgtaaaactggcatcaacctgtctgtgggtttcaatgctgttgcattgcagggactgaaaaagtgactgtgtaaggagaaggggttaccctacttttttcaacagggtaactaaattcagtttattgttctaaaacagaggggtgtgtgtgtacgtgcgtgcacgtgcgtgcgtgtgtgtgtgtgtgagagagagagatgaggataatacagatcagtttatgggcatgatatgcttcgtgatttttttgtgttaagtatgttgtaggtggtactccagctcctctgaagtttaacttacctagaagttgacactgtgttgtgttcttttaatcaaaaagcttaaaataatgaacttgttttgtctttatctttgtaatcaataaaatgtaaaaaaagagccctacaaatttctgtataatattgaatgtggtgctaagaattaaaagccatattgatgaaataaattaaagattaaaatataaggagctaagaatgaattttgagagtctgcacacaactcctctctccttggacctttgatggaagaacaaaagtgagtcaactgtcagcttctccagctaccctagaaaagcaacagaagattccaattcattgatctaggaagaatctaggctgtgaactagacatcctgctacacttgtgggtattttcacccttcttgcccaggctggagtgcagtggcacaatcttgacctccgcctcccggtttcaagcgattctcctgcctctgcctcccaaggagtgggattagagccatgcaccaccatggccagctaattttgtatttttagtagagatgaggtttctccatgttgttcaggctggtcttgaactcctgacctcaggtgatccgcccaccctggcctcccaaagtgctgagattacaggcatgagccaccgcgcccagccttttacttgtggttattttttaaaatgtacttatgtatacataattctgttgttgttttaaaagaagatataaaaatgtgctcagtgccagaatgcctctaggttcatatgcagcattttttttttaaagaaatgaattcaaagcacgataataagtagaagcctgacttggcttgaacataacactctgtcggcagtgaggtaaagtgaaacaaaagacagtgtccccaactctgccatgaaggtcagcagagtgtgatgtggcactttgcagagatggatgagacttccaaggctgaggacaaggaagagcatacctgcagtcctttcaatcgcccatcatgggactattagcttgagcgttctggaaaatattattacccccagggcgccatgtaactccctggctcctgataagctgccaacatggctttctctgggctgcaaagttggagctcccctggcagggtgccagggttttaagaaggctctgggggcccaaggtagcctcctggtgcaagttaacattcattgtaaaacccgattcaggaaaaaaaaaaaaaaaaagaaagaaaaaaacccttcccttgctttcccctctgcacagagctagctggcatacaattaatatctgtgctggcacgttgccccttattttaggggctggcttttgctttgggatggcatggagaaggggattatttgcactgtagcttttgatgtaagccatcattgtcatattatatgaatagcaccgcgtaaggatggctggggacaaagaccagtcctccatcccttcctcacactgccctatgtaacccaagtccttgtcacaaaagggctgtctgattttttttcccctttaaaatcttatggaaaatagtggccttagttggaaaccttaatttttaaaaagcatcctttaatttgggcattgcgaaacgttaaaaattggaaaagttgtttttttcagagataatttacacgtttgtacacagaaatgctgcacacatatgcttataatcatatttataattactttttctttgttgcaatttaaaaaacgtacacttagttatgaggtcttaaggaatgctaacattgcatatgtagtcatagaagaaaaaggcatcacataaattttggtaattcagaatggaagcctatatcatgaaaataccaaaaccataaaatctacttacttgaggaaaactgatttgagaatatctggcatgtttcttagctcactaagtttagtgtttataaaacaaatagaagataatgtttttagtagactctgggtgtccgtatacatatgtgtaactatacatatttaggctttatcataatgtttgaatggagaatgcttaatgtagtaatatagcaacatagcaaaaattctaaacttcaaatatacaattcaaacagttgtcacagataaaggctagataaggagaaaaaaatgtatttatgaagcaactcattaaataactcagcattcttagctctgtgatgcattgggagttgtagggaagggagttgggagctgaggaagtagaagtggtatttagtcatatttctgaaactattctggatttttgttttgtcaggagaaagatgcaacaaatatttatagggcctcccattttttttttgcaagaggagagcagaggacatagcaatgaacaagagagaaggtatcattgccccccatggaaactgggtttttataagggagacatataaaaaatattttggggttcaaggatgtaacctgatggggaatagtgatatttttgaaaagctgatcatgacttgtaaagttcaatttcagagtactgatgagaagaaccatgaaatattgtaatttttctaattaacataacacctggaaatttctaagcaaatgccattggaaactaataatatttggtcctaatattgaagtcgtatctattcaactcactgacgattcacattttcagttactgtctgaagtttgaccagatagggaagatcaaggggttccttaaaagaatgttaagtaacaaccccaaagtaatgttttagctttcaaaatactgaaagaggtttaaggtgttatcttgtccaccttgttaatcatataaattctattatccctttaacatgtctagccaatgaagtcagtgttttccatctgcagtcaattgggtattgacaaggaataagaaaggatttctaaaatacatttttttcaagctaatttcagctattattattattattttttaatctctaaatcatgctgttactatttcgtcacccagcatgtttccattaaggcaatcacattaggttgggttgacccagtaaaactttttatcaaccaccaggccaattcagactgcagccaaagctatgttctcatctttggtgggctggtcaaagtgaacctttggatctgataagaccaagtacatactcccatgctatagtgttttcactaaaacacttttagttttataatttaaaattgtacctcatggcattggaggtgattagacttttcctacagatggaactgtgtgttggatctgatttttagttgggcagcaaacctacccagaaccatctacttgcccagttttatccttacccacagccgcctcatatttctacagcactttatgtttcacagtaattttccctccttgattctacaacttctacccctagaaacctgtgttattttcatcccttacagaatcacagatctgtgagcggaacgttgtgttcacaaaatactgttgattattttaccacttcaatggttgtttcagacaaccacccttttcttttcattattgcttaaatatatcagtgcatggtgtcatgggttacagctaataaaaatcccactcgagtgactgcagcctggcttggtgggaagtgacactgcgagctgcaggccgactctgaagaggcaggttttagatgtgccatgatgccagggattgatcttggctctgcagagtggaggacatagagatgatgcgagcatccctgcctaatggtccccagcagaggatgggtggaaggtgacttccgggttcatgctcaggtggaagctgcctgccctcactgccttcttaccctgtctccgtcacaacctttcctatccttcccagtgaccagccaagggcaagacaagactgcaaattaccatctaaaagtatacttggccccttcaaagtatgagagttagatcactttttttttttttcctcatgctcctttcatgctccttccagccaagaagctggaaactaaaatcccttttcttttcctctcaacttagtcaattccatagcatgagctgagtgcctgttgtgctcacctagcatcgtgtctggcacatagtaggtactcactaaatacttgctgaattactaaatgcatggaagttccaggatccagtgggagtgataaaggtaagggaaaattaaggcaagcaaaggcaggaaaaacaaatctctgcttaaaggaatcaagagactggctacccttggagatagtaactgtaaagggtttggctggggcttctgtgtgctgctcataatactctcttgatcccacttctggagactgggctgcatgcactatacaaaaattcactgtacagctgtaatgtatgtatttctacttaatatagtttatcctactatctaaaaaaatatgcctttaaaggatagtgtcggttctcaagtaccttaacaatctttttgcaggtgagggtggaaggtgggtgaagaaaccaatatacaggcaacgattaggatcattatttggctcaacccccattccagtaacatgctgtgactgcaggggaaagaatggctcattccaagctctgcccttatgtatgccattaacatagattcccagggggtgggtcaccttctgagtggaggcccctaaatctaatgcccaaggaagccaagactccttgcaccccgggtgacacagaatcctgggtggctggttcaggagcttcatgtgctagctcccatttatgatttcttttttctttttttaaagaaagaaacataaggaaaacatttgctttgacattgaatccacccctacatgtaacagtaattgcagggcctagagggggaaagaaagtatcattccaatttggggccaaccagccttgacaatattgtgttaaaccttctgaagtggtgaagccaagctgcagcgaggcaaccctggcacaggtggacaatcggggacatggagagctggaactgggagacacttctggagtcaggacacgtaaggagtacaaaattactctttggggcactctcagggaagacctgtgcctccaggcctggcccttggttatggcctgtgctcctgactccttaggaggttttggccatgagctaatcagatgcccagttcacacagtaagatatgactgcttgacctccacatggagcccgactagatccccctaaaaaccacagttgtaaagctctgtagaggtagtggcctcttcaaagtccccaagcacgcagccacacgtgctttctcctccagtctccgtgtgtctgtaaaagttcaaatactgagtcaagtttattgtttctatctcgtttattttaagtatagttttacactttattatgtgcaatgacatcttaaatggagcctgtcactccgtcttgactactgctcggggctggagccacttaccatgtcacacattcagcagccctgattaaccgaatcagaatgagcagctccatctccaccctctccaaaatagtgccccttatttatatgaagcaaaatatgagaacaacaggatcctgtatctaaagtgggaaggtttccaagttgaggaagtttgggatggcatttccctcccttcctccctcccacccttctttgctccctcctttcctccttccatccctcctccctccctccctcccttcccttccttcctccttctctccttctttccctccttccttccttcggattttttaaaacatattttgttatatattcactctctttaagaataacactttgtttggttaactcctgccccccaaaacaacaacaataaaaaacaaaacaaaattttacaactttcttttcttcttctctcgtctgtggttgcaagtcagtttttgtagccctgtcattatgtgaggtggcctagagtaatttgaatatttcattctcccggctgctaatgcagcatgcgttacagatggtacttgcttcatccttctggacctggttcaattataaatgaaagtagggagctgagatttgtctttttgtctctgcttagttggaataacacaataaagcttgatgggtaagaatttctcaaactgcctctttttcacctcggacatttcccaattagattgctccttagagtacttggtttgcactcacgtttggagccaaatgtataatcattgttgttatttttggatactttctttcctctcacttggaataaggctgtattctaaaagtataagcaacctctgtctgcctgcccccacccatctttttctttttggtgtctatttctcatcaattcttagcagtgactgcatgatttattcaagaatcttgagtaaaaccacttccctcctccatacccttaaaagtactgtcccctcacatcacactacttagggacacattggtggtcagggaaaaggatttttcctcacagtaagatgtgtctgctcagctcactaaatcaatatataaaaatagaacacacatgtagagcaaattatgcaaatttatgagtataatcttacatgcacatatttattagacactagtagtattttaaatgtgtttgtgtggaggagggtgtgtgtacacacatgccaaaaggctttgggtttggtatgtttttggacattctaaaaaataaacattaaacatcgtctttcattgggacattattcttttttttttttgagacggagtttcgctctgtcgcccaggctggagtgcagtggcgcgatctcgactcactgcaagctccgcctcccaggttcacgccattctcctgcctcagcctcccgtgtagctgggactacaggtgcgcgccaccatgcccggctaatttttgtatttttagtagagacggggtttcaccgtgttagccaggatggtctcgatctcctgacctcatgatccgcccgtctcggcctcccaaagtgctgggattacaggcgtgagccaccgcgcccggcccattgggacattattcttatggtcattttagcaaattgtaaagcttgctatttagttcaggctatacctttatttggatcagtgtgagggatttttttccttcaacctcaaatttatgatcactaagtgttgggcaaatacagtactatagatactcttagaagggtgactaattcaaatatctaccagtaatgtcaaagaaggggggatgaaccaactatattctctaagattaattgatattgtattagattacatgggcgctccaagaagatcaatatatatattttttaatttcactttgttcctcacgtactgttggaaaccagctttgcagtgtgacacctgtgggctcaacattgtttcacccttattttgatgacctgcccttgtaaagttaaatagaatataaattgatagtatctcctagcctcccatggttctataagtttaagtcattaagatgaagaataaagtgtcctacagagaaattgccagcttaaaagacaaagtgttggaatgttacagtaagagctctgatgccctaggtcaatacaggttggcagaagcagcatagtttagggaactctgttcttttccgatgcaatttgcaacagtcctcagcccagcatctcacttgtttttcctactatgttaaatgtgatcctacctacccttagagataacagtgaaaattaacctaaaacatagagccaagtctttcagcaatttgacatactttaaaaaatataaagtgtgcttcattttcatatcagcttatgataacccaccttctggaaccaacctggtaattagttatctgggtctgcagtgtgcagtaggtccattcctccatgtgtctctgtctatcttgatttctggctcagcttctgatatctaaatgatattcgttgagcaatttggaacctaaatggagttagaaatgctattattccatatttttcaagtagttaaaagaacatctttgtagcaaattttctaggaacacaacaattagaaatgtttaataacctgtggtcactttcttacaattaattatcttgaactcattttctgctaatatcaaatcttgccagaataatgaaattggagttcttattttcagctagttttcatttgtcaatcattgacctacttttctttggaaatttgtaataaactgaaaaataatagcagctgtactaatattggtataataatttccagtgtaccaagtacttttcatgtatattatctcgattttgatatcatgataattctaaagggatagcttttatttttcttagtttacaaatgtgaaaacaaacccagagaggttaaacagtcaaaatcacaattcaagtccaatgtgaatgtattaggattaggttcaaatgtgagtagctgaaaccacatccaccccctttcaaaacataggaagtaagatataagcagttcagggctggcagagtggctccatagaccacaaaaaacttaggctccttcctgagttttcactcagtcttccctaaaaggtgatcctgtgtcatcctcgtgatctaagttgactgctagagctccagccattccatctgcattccaggcatcagaatggaggaaggggcagagaataactgtagacttattccttttaaaaaagactttctagcataatacttgtactaccacttgtatcccatcagttaggacttagtattacgactacatttagttacaagggagtcttggacatgtagctgggtaaaaatgttccagctcttagaaacggggcaagtttctgaaatgtcactgcacttgggtttagctacagcctacagattttccctaaccaagaaagatagaccgaggagtcattttaattgtctagatctgatttggaacataggtgtcatgttatactagagaatctggctgagggcaaaggcaaatcttgatcgtattaataaatgtttgctgtattgggtgtaattgtacacatttgcagcaaggcacatccaaagaggaggtgatgtacttcccaagcaacagcaacactgaaaagggactgactccaatcatgccatggtgagcaatctgtggagacaagagtgaccacaaactctgaaataaattcataaagattaatctgtgtgctccaggctactaaattcacattcccccttggtgttacttcctacttaaactttaatagaatggtttataggattgtggagatttataggatcaattccttggttatttggtggccagtggtcagggaacctaaatgccgtatatgacctcagtagatagggcttcttactgtcaaaacattatttctggaggaaaaaagaatccaaattcccaagtacctgggcatatactttatgctctgtaactcttgtcaatgagctcagcaagtggggtgttttccctcagttctttgtcttctatatcagttgccctaaaggctttaggagttacaatacacacacacatcatacctcagaggtactgatggcaagtagctatctttgatttatttgtattttttaaagaataagatgaaaatagagcacttatatgttcacgacaggaaggattttgtgtgtatttgtgtatctgtataatatttcacattgtatatcactttagcctcttaatatgattttccttaggtcacaaatccatatagaatatttgacagtgtagcttgctctaatatttttgttgcagtaatgtggggatgaccacattactcataagtgagctctgctggtctcttcagaatgtcaggagaaacttatggtgctgcctgcaccatcacatattttatttagaccacagatgttcagtctcataatttagttgtcttattttgttacattttcagctgcattttttctttttcttatcttgcctttataattttattggaatttgtctagttatagcccacctacatggaaaaagactattatttgtggcaacttcggcccacaaatctatatatataacttgaaatgcgtaggtttcttatctaagaaacctttgcacaaccctataggaaatgtagaagtgtgcatatatctttaccattattgcagctactgtttcagtagtttctgttggaacatttgcaatgacttccaaagataatattcttctaatttaagactttggtttggtttttataagccaagttgtctttattataattctcctgtgaattggtcttctttgggaaggaattttctagcactggaggacaggtttccatatagttataggttaaaatacccttcctccaccctcacctttccagcttaattgcttctgtcagcggccacatatatggttgtcaacagtttacagacagtgatttaaccctcagttttagaaacatatagaggtgatgtcttgacaaaaaagagcaagcagtataaagatgtacatgtagccctacctacttccatgatttttgtctctgcccagcaagagtcagtgttatctttaaaaacaaattgcttctggtatatgtgcgataacatgtatgtgtgagattgtgcacatgtacatgtgcagtggagtgggcatcaatgtattttactgattgaagaacacagaataatttctattctcatttgttttggaaacttggaacaggaagagggaacttggcttcatcaatgaagatgattggctcccgataatggctcccttctggtgccagatttaaggcaggaaaaagcaaacagctgttcaaaatgactttcacctagtaaacacaggagagaaggcagctaacacttactggatgccttctgtgtgcccagctttagtctaattgctttacacatgttaactcatttaaacctgatggcaatcctgtgagataaatgtggttctccccagtttacagatgaagaaacaactgaggctttgagaagtgaactgactctcccagagtcagacagctaacaagaggcagaggagttggaatttaacttaggtctgtctcattataaaaccatccagtttccagggtaccatggaaacttgtgtcactgtgagtcagatactctcattctgtcagggtgtgaaatgccccttaaaatactgttatgtgaaatcatagctggtggctttatgcactatcctcactgactctgctaaccttgtttgaataaattaaaaaatatttatgaacatgtaccatgcccctagcaaagttctaaatgccgttgggggaaaaaagaagggtaaaatatggtccctgcccttggatgggtaactctcatttggcaatcagaaaagcagtacatgcagcagctgatggccatgatgatatttaataaatttgtgacttgggtgacaacagaaactgaataactgtatgacatcattcaagcacaaaatccagaagctgagaagggggagattagtatatgctagggtgaagggaatctagaaggacagtttaaatgtggctgcatggaaggctggaaggaagacttgagagaaacagctggactgagcagtgattgtagaaacataaagtgtcatcattacagatttaagaagagtaacatctgcctggcactttacagtttccagagcactttattttcttatttctattttctctcacttccattattattgttattaatcatcatcacccctgctttacctatgaggaacaccaatcaagtaccatcccttacacatattgtgccctaggaagggctcctgaggaaataaataaaagactctcatgctgagagagaagcagcaggacacttgctcatggtcacacagctagtgagaagcagagacttggccttatcccacgccctctgattccaagtttggataaaaaataaaggctttttctagagttttatattccttatcaatggcttccagtttacaaatgggttgtattccagaaattttcttttctttccttttcttttatttatttatttatttatttttttttttttgagacagagtctggctctgtcacccagcctggaatgcagtagtgtgatcactgcaacctttgcctcccgggttcaagcgattctcctgcctcagcctccttgagtagctgggattacaggcacgcaccaccatatccagctaatctttttgtatttttggtagagacggggtttcacgatgttggtcaggctggtctcgaactcccgacctcgtgatccgcccgcctcagcctcccaaagtgctgggattacaggtgtgagcttttatcctgttttttttttctttgcaacctataacacattttcaggaagtgtcataaagctagattccaaggtccatttggacctattgcaaaagagaatatgccttaactgtgacctgcttattctgttttaattatgtctgttcactctttacaaaatagttcttaatacaaacaatacattctgaggcagggcagactatataatttgtgggtcccagtacaaaaggaaaatgtcaactcttcattcaaaaattaagtatttcaagatggcgtcatcagagcatgaaaccaaacacggggtccttctgcatgaggggccctggggttccacacaggtctcatgctcacaaagccagtgctttggtttagaatacaaggaatacctttttatcctagaaattttatcagagagtgcgctggaggcatatacatgtgcggggcccggagaggaggagtggacaggatatggattggatatggctttctgcgtccaactgcactctactcctaagtaccaggaacgtgttaactctcagttgcacaaggaaaaatatctcttgataagtcatccccaaagaattctgatttggagcaaaggggaggatgtaaaagtgggaggtagtacaaacatcaaaaaaagaaaaaaaaaaaaggctttctgtactcactgccaactcagatttggttcattttcaagtttataagtttattattataagtgtagataaggctcattcttatgtagaggtcccagtaccttccacatatatttctggcacagaaaaacagatgggatagaaatttacacaaaaatcacatctgccactctggacaattaagcaaaacatgaaattgcaactaaaaaccacagggtatttaaatagaacaagatttcaaatgaaggactcatgttgttgaaccagaatgtggtttaactctacatcttctgaaaagggaggatattttttggtctttccatatatactttttttttttccacatcagtagatgtgcctacttaacgaaaacaacttttctcattcagagagaggctaagccaaaatatagtactctttcgaatcatattatctgaagggacatgaaaagggagtaaaaaaaacctaacattgatttcacaccagccatgtgctaggggctcagcaaaactgcagacagcaagtacagccggctttattttacagttgaggaaacaagctctgagatgtcatccaaggcctcccagacaataagtgctagcttgggacttaaggcttgaattctaagtccaagcttgtattcttcccacacaccagactacccatcctgttctgaattccaacacaagaagcccaggacacagaggggcacagggcctgcaaagcaatccagcccctcaaccttgcaggaacccaatcatcaagaggggagaccctactattaacattctctgggtcctcatggaggctgagcactgctttataactttgcttttgctcccttaaatgtttcggaaatgtgacttggatttatagattgcaacggctttccattgtgtgaaacccagtggttcccgatagaatggttccagccagcaagaacagttgccttgtgctgagtgtagcggaagaagacaataattgacagagaagcatatcatctctttctacccagtgtacccaatccactctgcctcatctccccaccatggacctggaatgttgtcaacctacttgtgtgagataagaaaactctcattaagaaatccattcatcacgcctgtaatcccagccctttgggaggctgaggcaggcagatcacttgaggccagtagttcaagcccagcctgggcgatatggtgaaatctgtttctactaaaaatacagaaattaactgggtgtggtggcacacgcctgtaatcccccagctactctagaggcttaggcatgagaattggttgaacccaggaggcggaggttgcagtgagctgagatcacaccactgcactccagcctgggcaacagggtgagactctgtctcaaaaagaaaaaaaaaaaagaggaaagaaggaaagaaggaaggcaggccagccattcaaattgattcgaacatcagattctttgaacttgcacatgtgatgtggtttgactcccttataaatacatcgaatttggtggcttaaagctttagagtggatcatgaagaatctcacaggggtcaaatgagactctggccccaaattatggatctgtacttggggtacattttctttcctggcccctacaaaggtgagcagaagacacatttcctttggtgtcagaagtggcttcatctttgtggtcctgcagggtaaagtgtgacacaagagaagacttaggtccagaagatgctatacataaagtggggaaagcaccttgcccctaatgaaggcccctgagacatgcactcttttctgcccttcacatgatgaagtctcactttgacatttattaaatgggcccggtagaaccagtcctctcctaaggctgttgtaaggaccagatgaggtcttgtgtgtgctgtacaaatgggaatgacaccatcataaccaggaagattgagttggagttggaaatctagggagcatggcaaatgtggaccttgagccaacttttattactgtggcaccaaatcatttatgaataacttatatataagtgatgaaactctatagtactaaaaggaacttggttccagtcacttgccctcatgcccttactccattttggtctataaaaaaagtcagtgctcatgttgattcccacactttctctctgcttgcctgcacctattccagttacctaccttttgactccctttttttagctttcagatggtaactgacttgagaccagtacatccctgcacataagcagacagtccatgcttatctgaattcctggtgtaagcccagggtagtgcaaagagcatggacattgaagaactgcacttgcgtaagctgtaactttgaacttattttcctaaaaaataggcatccaggatctacttctgaagcttgatgtgtgggtcagcatagacaatgtaggtgagataaaatgaaagctgttgggaaggtataaaatactatcaaaataaagaagtctaaattgatattcaaaggctatctgactatctctgcctttttagagaatgcttgttttccaggtccgtgtcttagccctcccagacccatctctgctctttatagataaagttgagtgactttcccaagattacaaagatcaagagtggcagaccaaggacatctctcacttgaaaactagggctcttttcactgtagccagctctttgttgggaaatcttcataatcagtgtcaccttctgtgctccaactcctcagcctcacgcttgggtgaacacttccttcccttcttgaccattgcaggctagtgccattctcttcttcagttttcattgctgggatgtcttgcagcatgatgccttagctgttctgtatctatgggggtccatcattttccccttaaggatcttctcctatagggtgcaattatgcagttatcttactggctcatctctattttctgctataacttttgaagtgcatcaccgtctctaactgtttgtactggcggctcagagaatttccttgagcaaagtgcatttctgaagccaagtcccagcactgccatgtcttttgatgcccttggtctcctttctcagatgtgagtaaaaatattggtgttaattacataggcttgagatacatgcaaagaagagggtgaagacagccgtgacctctgaaagagaggcataggtcagtaaaagatgcattcattccaaagactgctgcttgtcctgtgttgggccaatccttttcagcaaggtaatttaaatttaaagtcagcattctcctgattctgtttcctaaaggttccagctttcataggatgggtacacttcactcccaggcctcctgggaggcctcctctacccttcctctaccgttttcttgcttctccctaaaaaccttgaagatatggaatacttcctgcctacatcttcaactcagagaccgccaggggatttcagtgtttattgcttttttctctgggtttggaacagttccgaccaggtactatttgaaaaatgtagaagtatttttttgcttattatcaaaaggagaatgtagttttcttgcaacaaaatgagaacttgatatctttcttgcctcgagggtgtgtgttgggagacgggggtggtgttcagccttctcttcctccacctctgtatcctggtagccagaattgaagttccaagccacaccaaggagggtggctgcctttcatgaaaggcagacatgtagtaattacctttttgcctatctgccgccgtccccttgtgctgagggggttcccttgccgctctgtctgttgtctgcacactgcatttgtttgtctggaatgcagaactccttgcacttgacaatcactacagtctttctgctttttctcttaaacagcttttttaaagcacccagagacccttaaaaaaaaaaaaagaatgcaaatagaaattgcgctggaagctgaactgaacattgttgcgagtcatgagatcccagccacactgggacaaactattttttattttgggtaatattttttctttggcatttattacacctctgttaaacacagctcatgtgacacagtgttactcataggcaatcagaaaaaagctgaaagttgagccattagtagggcagggcaacttattgttaatagcagccattaaagctgaaaggaaaaattacccatctgcccccgccagacctgtctgtctgagatcgagattgggcctccaggccggaaggggggctgggcaaacatgagggaaggagaatggaatgtagaaaccgagatctttgtaagggaagatagagctgaattcaagtgtgggccctaccccaagaataggggggaaaaaaatcctgccccaagaattccagctgtcctttgtctgttcatcctttctcaggaaagcacctgatagcttttatccaaagatctgctgcaaaatccattttagctacagacaggaaatgcaaaagaaagattcctgtagcaacaacaccttgtaattatgaaatactttccatcacagtgcataacatatagcagatttactacaccaaaattctttgccgttagatcttggggtacagcagtgaaattttctctatctttaaaagaacatgtggtttaaacccctttcaggcattttaaatcctagccaaaggtgcaacaccgtttaccaactctgacaagccactctaaaagtgtgcttgtttgatggggccatatcagatatcacataggaaaataaatttgagagggctttgccacgagtatgtttataaaactcacaactggtctggaaaaagaaaggcaagtggcccattttacagatggtgctaacacactccagtgcagagagtgactgttgtcaccaggatcacatatcaatttggaaaattgtaatagaaaccagacttgtggcttggagtatagcccctgaaagggactaggacagcccactcccctgccctgtcctccttacaccttaaaagggacagtgattggggactattgctgccccgcgtgctttttcaggcagagatatcagaatgaggtctgaaaggatagttgggtggccccagagaagacctccacggctggctaagagtctgagcattgctggcagtacttagcatttaggctaccctgagtgcatgcctggctcatgataagtggttaggcctgtcagaggcgggaggtgcctgctgactcagacccagagaggtgactcctactcttgagtgtctgatttctcagatatgaccatatccagttctgggctccagccctgacctgttccttggctatcagaactatcataaggccagatcagcttaactcatctccaaggtaattcttggtagattttggttccttcttgcattttgtggctttgtcccactaagagcagttgttctcagccctctgtactggtggcacaattttgaatactgtaattattttggttgcattttggaatgaatttaaagttctcgcaaaggatcttcagctccatgtcactcatcagagctcttttctattttccagctcttgcatataggtaacacgcgcacacacacacacacacacacacacacacagagtttttcttgatatgctgtctcttgccttccactgtcagatcgtaacctgatagactgaattgagtgacccactcacactcagctcagcattcctatttcaaacactgctgacacacggtatatcttcatgtgtaccagcaatcagactgtagtcaattaaattgttttgaaaattaggtttatgcacttatcagttgtttgagagtctggcagttttggccttaagagttccctgtcaaagactatggcgtgaaagatcactgctttcaggcttctatgctgtgattaaatgtggagagtggttttggggacatgtgtcttaagggataagctagtgaggaataggttgggactggtaggacgagcggcctgtggcacatttcagagccctcaaccgtaccccacactgcatgggccatgactctctcttcacccatggatcatctctagaggggattcatgatgtcacctggagtctctgctctctccaagtgtactggaaaggattgggtgttgggaaggcattggaaagctggtattagaagagttagctggggagagatttgactgaagagaaggaagcgtgtttgcagtgttaacgcagtggatctgcctcaagaggcccagaacttaagaaagccaggaagctatttttctacgactccccatgttagtgaaggcaattttttaacgtgatatccactttgaattctttgatctttaagaaatatgagtaagagaaaaggatagatggcaagatagatgaggaacttcagagggggctaagattactttaagggaaagctaatgagttgttgaattgttttacatagtggggtgctatgaataggatgttaaggaaagttcttcacaaataaatgacagaataaaaaaaaaataaacctaacataagacaattttctttttcagcaaggcacagggttctttgggaagcttcaaaaaattcaaaagtcatagtgccttttttcatggaattcactaagtagagacttttttgtaggcatatcattaaatgctggactctcaagttttcgaaatgagaagtctccatctgggaggtataaaaggaaacccccatctggttggttttagcatcttcaaggtgaggatacaattcttaaaattgtctacctatttctgagtcctggttcaaattcctttgtgatgtctatgtcagctgggaccctgtaggccccactgagttgcacatcaccaagtgtgcccatcactgtggttagaggccgtgggctgtgtactacagacaatgctgtaattgcttctgtgaccaagtgagggcggagtttgccctttatgtgatgtaggcaatattctatttttaataagccagaaaaatctgttcaaatccagtaacttcaagattttccaaagactggaagatgtggaggacgtgggcatcagctggaatctgatttctctcccctccacacttgctcttccccatttctcaactgctgtctcccagtgtaattaccatctcaagcattttctgttcgtcccctgtaggtacaccacatcgtgccaacaacccatggcccagcaggaatatacagtagcctttgccagggtccaccagggcttgattacacttcacggctgtaattcaagcctgctaatcctcctctgcgttcggaaaagaggcctgttctgttagataagctgattactgtctggtgtgtgcttcatgcctagcaagagttgtttatatgtggaattattgctggctgggctctgtgcttcgctacaccgaggaagctcgcttaggggtcaggggtgtcaggcttcacctctgatctgggaggggtgagaagtggagtgttgattacagctgtttttctctcaacctctgtgctggtggctaaatatttacttttctctgttaacggaaggagccagataagattttaagagtctgagacttttgcccctaggacccactgtcaaagatcatagagtgaaagatcactgccccagacttgccacattctgattaggtttgcaaggcgatcttagtggtctttttgtctttagggctacgttagggaggactatggcgggacaagttgagtgtgtggtgaaatcaacagccacagattgaagagtgcccgaccacagggaaaggatgcccgcagagaccatgtgaatgctttctcacactcaaagatgttttcttcaaagccacagaagccttgaaaccacctttgcctctgcctaccagcccatctctggtctggtgtggagcttgtggcttgggtgcagtctacgaagcccttgctcttcatggaggaggaagtgcattttgttataaccgtctgcccagtgatgttggcgtgatttatgctggctgcactctcaggattcccatcccttttgcggggtattttgtccccagatgcagagctgaggttctgcttaatactggcttttaagtgtttaagccctacaaatggctattcggtttaatggtgtaaggatggggtgagtgctgaaacaagtacaggtaaacacaagcacctggcccttgtcacctgctgcatgggcatacattggggtctgtttgtatatttgaatatgtggcagtctacactggagtaaggaaataaggatgaatgtcaaaaggcttaattgtgatgatatcacaattgaggccatttgttgagtaaacttcctccacatctctgtatactaataatcggtttgtcagcttttctctatgacactatcatttcctttagggcaggcactttgtctttcatttctgtgaccgttacctgtctggcccatagtaaccaatcaaggaatgggtctttgatttagtgtatgaataattaatagatttcagtgaagaggcagcctatcctagattgaatgcgcggtataaattgttaggtatttatcatagctcattgtacgtgggttccttcccaggtacctttcttgcctttctttctaggaagcagagaatccgcatccccagaaacatgggtgttccttaggtgtaaagggcatggccagctaaaggcagaacagaaaagctgctctggaaggggtactgggcggctgtggcatgtgatttagaaggaaggggtgctgtgctatgtcctcactgctgagacatctgggccacataatacctcttgatccacaaatatcttgagtgttatctccctcttttcttttgccattcccacccctctttttcctttttgagtcctctttgtttttcatctaaagtgttctcttccctttgccttttctagggaaatacttgtcccttaaagatcagcatattctccaaatggatgaattgtgccccaagggggatttcttttcctagtgactttaatttctagtcttagaacatatccaaaaggaaacacagaagtgcaaagttttaagcctaacttgagcaataaaagatttcttttctgtgcaatgattaactttcccttctttaatttcaagaggttaatgaatctgtgagcttagtatacttgtcattgtacatatggcttgtcattgtatgtatggctgggctaaaatttaatattgaatctctgcagtaaatcttgtggttttacatttgtgtgtgtgtgtgtgtgtgtgtgtgtgtgtgtgtggtgggaggagagagagagagagagagagagagagagagagagaggaggtgtgggggggcggggggctgccatccagaagatggaggtacaagtaatggaagctttttttcttctccctacatatgaactgaataaatgcttggccgtcaacagaataatagtttcggaaaaccacaccttgaaattcaccttagcatctttgaaataatctcaggagggactgggcatggtggctcatgcctgtaatcccagcactttgggaggatcagttgaggccaggagttcaagaccagcctggccaatatggcaaaactccgtctgtactaaaaatacaaaaactagccaggcatggtggcacgcacctgtagtcacagccacctgggaggctgaggtgggagaatcgcttgaacccgggaggcggaggctgcagtgagccaagatctggccactgcactccaccctgggctacagagtgagaccctgcctcaaacaacaacaacaaaatctcaggaggttttaagggtcgagagatgaacagcaaggctgcattccagagactctgaccataaagctaaactctgagcattttctcacaggatgtaatcactgactatggtatttcaaaagtctagggtcctgccactgtcacaggactacagtagtagcaaacaaaggagggcggaattaagaaaatctctgctttttattctgttcataattatttacatccctgtcacttaaaggctggataactacctgtctgatctccaacctgttgttgccatcctgtcctcagttttgcaatcagcagcattgtttgaatgtttacctaaagcagaaatctcttagtctataccaacgtcagttccctgggattccctctagaagaggaaagagaactatgtgaacataattcacattggtttgcagaatcttaaaattagctagtttactttaggctgaaatgactccataaccttctggttttttgcaggaaaaagaagtatacattatatatacctttgacaaccttgatacaagtgttagatgcttctttcattggaaaccttcaaaatgcctttcctctcagtttttctgagcccacctgttattttggttacatatgaaggtagggaggtggccccataattctggttggcaaattgggaacagagcctggaactggaggatatctcctgctgggtgatgctgaacattaagaccaaggtcttacaacagcaactcagtgctattcattaccaaacagatcaaaaactgggtaacttttgtttcacttccatatctcctgtcccaaaaagtgaagtcaaattcagcattaaaaaaaagtgtttgcacaactgtaatttttgatggtgtggtgtagaaacaaataccatgtctgtttggtttgctttaagacataatagaccaggtgcagtggctcacacctgtaatcccaacactttgggaggccaagacaggaggatcacttgagctcaggatgtcaagaccagcctgggcaaaatagggaggccctatctctacagaaaaagtagccgggcgtggtagtgtgtgcctgtagtcccagctacttgggaggctgatgtgggaggattgcttggacgtgggaggtcgaggctgcaatgagctgtgattgcaccactgcactccagcctggacaacagagtgagaccctttctcaaaaaaaaaaaaaagaagaacaggttaagagtgtgaagctgagaaaactacatgtgtgtcgttagtagtttttcttggtttaggctagttcaggaaaacagaaatgaaattctgcaaaaggcagcatgaaagtccacattggccttcatcccgtgaaactctgccagctgctacttggggttcaaccctattctttcttcagggcaccgcctttgcttgctatcaaccttgctacaattggaggcagctgtgaggtagggagaacaccctgagtgaagtcaactgcagaactaagtatgtgcccttgggccactttgactcccagtacctcagtttcctcatctgactaaaaaagggttaataataccccataacgttcatgtgagaataaaagcaaaggagataatttttttttttttttttttgagacggagtctcactctgtcccccaggctggagtgcagtggcgctatctcggctcactgcaagtcaaaggaggtaatttttgacaatggatttgtaaggtttaatttccatgaaagaaaatatggcgtatttagttcttctctaccacattgtccacatacctgttctagcaatttcactttgtatattagctctttcccccatgattctgcacacttgtcttatttctggtcaagtttccccagctgaaatataggttctgtcaaagagtagatcctcagtatattatgttgaatgaacaactgaccgagagaccaactggggtccttgttggagtagcaatgttggcaaaattgtgcagcccagtcacactttgtgcgggttgagagatttttattttaactgagctgtaaggctgtcactgaacataagtggacatgaccagtctggcagagtcaaacagagtgctgctagaaagcaggcagcaccgaaagagaaaagcaaatttggcttctaagatgaccatatgtctgttaccccagaaagcatgagcccctgcaaagttctctgctgaagtggggagagttggagcctcctgtctgttctgcaaaggatttgcagggtgcttagcatgctggccccagtgtcctcatggaaatacggatggcttgctaggggctgtcccatacaaccagagtggggttcaatgaagtgccatcaacaaggtgcctacgaagggccatgctaatgtctggccagtgaaacaggggaacttccagagcagatatcacatgggttggagagatgttgctttacacagtgagcaggaaagccagacacctcttcagagaaatacagtaagaaccacagtaaataaggcccagcctcagggaggcagatatttaaaggaaaattaagacggctcctcatctatctctctgtcacccgttgatgcatttagccagcatcttgtggtgctaaatgctttttgatgatgatggttcatgatgaccactgtatctccccacaggggtgggcgcctccgatgtgagagttcttagtggggggctccatctccagtgcacagaaagaaggaatggtccagagaccccctgctctccccaaattcccgattttaccagcatgtaaaagcaagtggaggcaacaaccaccacaaaaaagcccgtctgaaaatcagagcctaatcactcccatctgctccagtgctgcttcctctcgctgcctgccaggatgtttgccgcagatgctaagtagcacattattttcgataagttgcaatcatttacttgaaatctacttctcctttaaaatgtccccctggaaacttgaatcggcagtcgagaagccttgttcaggatggaatttgaatgctcgcactcaagttcaagaaaagttaaacccatttgacctccaggtgttgatgaattgtaaatttcagccccttagactctgttgagaagagaggaagaggcaccagggaagacgtctgggagaacagagccattccttaggcctcatttccccaagggaaggcacagtgctgagatgagagacaggaaatgatggctccatggaatcgtccccaaagcagaaatgtcacacatccccgaagacattaagtcagtagctttcttggtccccatgagatgttatctcttttatccagagactggtctagtgaagattaaaggcataatttgcaatctggagctcataatctcagtcgcccttaccccattccactgtcacaactaggatttcttatttactgcctcttgtccaggacaccgttagtatcaccgttagtatcatgtcctgccatccgctcttccctgtcagttaaaggcttagtgcgttcaggggctacttggaaagttctgagaagcagcaaatgcctcctgcttttcatgcagcctgtttgcctgtgtgttccgtggctccttgtgtctaaggacagcacgagtgactcattagcagcacggcatgtgcttggggtggtttttgtaatgagtggtgatggatcatccacatactctccctgaaggaccctgactgaccttgtatgcatttgtgagatgactgtctggggtcacaggtgttgtttgtggtcatggaaaaagaaaagctaattggcgtgtgttttgaaatggacctggggcacccataaatagacccagtgtccttcagctggagaattctgcttccactaaagtgaacagaggtgatttctcctctaagtagggtgcattgggatctctcttccaatcctctgtacctgacaaattgagcaggctggttagagtaaaaacctgattttattagtatagtgtaaggaaacatcccactacaagatatagatcaatatatgcagaaaggcaaattacaggtactcagcctaaagtaatttgttagaacttggtctcacaggtttacagtttagtccaccttagaattcccttggtcaagatagagtcttctcttctactccctcatcacagaggctcttggctggtttccatatacagccactcctcaccacctaccactgtattctcagtctaaactcctcaagggcacccgataccctcactaggtgatgtctttccctgttccctcatcccggacttcctgggccttcttttgcctctgctgatagccgtggtagtacccaagagaggcccctctaatgaccaaggtctctttgatctgttctaaaacctcctctttttgccaggagttccccacagtgactactcaggtttttctgtgacttgcctctggttattaaatctgcctttttctaattttctctgtaatactctacatgagatcactgtgcaatactctacatgaaaacactctgccttctagatttttatcttatttttagaaataatttgtattagcttagattggttaagctgtctaaagcaaacaaaacaaaaccctctgaaaaaccccaaaataacatggcttaaacaaaatacaagtttattttttcccttctttcttatagcccaaagatgactggtgggctggtctccagggtgtgagaactcccatctggcttctttccctagagtggcttccagtgcccagcccagctcatgggccgggggatgggggagctgcagaagggatggagtgatttagagtactgcaccttgttgccctactctaggctactggtaaccctggctggaatttgctgtttggcatcagtgacatcatttcctctgtctgtccttggtctgcacacctctgtctatggctgtcacctggcagaggtttgcatttcaatcttattgggaaggaatcctggtctagcagggagaaggtgtatcatattatcagtggtaggtctcgtctcctgtgatctgtagaactggaagtaatcatggatcgcgttaagactaaatgatcgacgaattctgtaaggactgctcaaggtcaatagctcattgtattaggaaccctgcctttgaattattcagcaattttcaaaaactgggaaatattcctgtgggagcaaaatgttctttatttcaaacttagttctgatgaaattgtttggaaagttagagaaaaactagttctgttcctattcagtttgtagatatgggccggaaaatgccatttgccactaggagctggaagctaatttgtagcctcaagacagtagtgacaacggcagcggggtaagacaacatggaggtgtgcacagcccaggcaagtcgttgtaatatttcacccatggggtttctctacatcctggcggagaagggtgattgtgaatcacagatcccacccagaatcaaaacttaaacatgcttcctcaaacctttgagtacaaatagtgtctttaccctcttctggttataatttatttattttttaatggaaatttgaaagcagccattaaagatgacttccaggccagctcgtctgacacaaggtgagattacttcagaactaagtggttcccagaagggtcttccagcctcagaaagaccgaggcttccagtgtgagctctgccaggccaggaggatggtgtcgcctctggctcaggggagactagggttgaagactgtggcatctcctctgagtgaagacttaagaagctgcaggatccttaatgtacttgggcaaatagcaagaaaggactataaagaggagaaaagatgagagaaagaagaccttttgaaatgtattctattggctgaggatctatggattccttagcctttgacggtatcagtgtgagcttgcctggaagcataggtcagtaaggtgggggtggggggtgtctgtgtgcatttgtgtgcgtgcgtgtatgtgtgtatgtatattcttggcttatcctggtttcttctgtgttgttgattcctaacgcgcagaaaaaccaaactcttaactctaaatctatcctgcttttttattcttcccaaagggatctttatcagtgagattgattcagatttaaccaaaaatctaaaatctatcagtcaccaagcactactgtgtgcttttgtaaaaataaccttatttaatccttagtaagaattaaggcataggtgaagtcgtgtagtaggagtcttgggcctggctttgaacctagacacccaaggcctgttttagtgtacgtttttttttgtgccatgctgtggcactaacagaagaaagctcgtgcccatacttatacttttctaggtattaaaatgtggtaggacaaggaaatctatcatgtattagctcttgccagaaagcaggcaatgtgctaggtgcctcactgagactcggaactgcagaacatttttacctcaaggctaaagagtattgagaaacttctgttttctctatggttgcttcctttaggaaataccattgtagagagaagctttcatctccacggaatgcacagcaagttgccgaccaatggctccacatttttcatgctttttatgtgtaactaagaaggaaactgttccttgtatcatgggttaccacaggcaatccaggtctcacacacccttccctggccctggtcctggtcctggccttctgtctttccgatggctttccccctttcctcatacctctgggtatgtcagtctaaggccaaagcttgtgtaagtcatgccctcctaccaacttctgtagctcctgtttaggcaaaggggtttcccgagcagcagtccagacttgagctattaaggaccaaagcccctcgcccaggcagccggcacccatccagaaaggcaggggcctatcgcccagcacattagctttctccctgccagctggcccagggaggcgcagcgtgccaagtggggaacgtgtgaatgggatccatgcccatgcatcccctgagaagtagaaaatgcacgtgaccagaaccgccaaaacctaacccagggaaaaagatgacaagaaaaacttggtgtgtttctctaaagacaaccacaaaacataaacaaacaaacaaaaacctaaaactgtctcaagagtgtcatataattttgttttcatctcttgccctaaaacctcacacaaagttttacacattgtggctgttggctaaatgtgaaaaacgagtgaatctaagagctcctcgcaggaccacgtttatttggaaagtcagcacggtgcctggcaccatagtaaatgctcaataaatattcctgggctgaaacatttgagggccgcaaattcttgcctttgtttgactaaatccttcaaatccctgaacttggttcatttactaaatccttcaaatccctgaacttggcctacctgcttggcaaaccaagaaaaacagttggaatggcttaaaaacaataatatcttaccttcaatacaaatcccccactttaagaaaccctggacctagattaagtcccacctcggtgtctctgagattctagagggctgagagacaacccgggggaacaagggtggctttcaacatttggagatttcttaaactacagcttctcatctgaagaggccgctccaggcctactgcagcatccagggtctccacttggggctggaaggtgtcaactcgggtggtaactgctttccctgtataatcagaagcgctgactgacacctatcagtaatgctgacttgtaaaatttagaaaacagaatcatcagtcatttctatttgtttgatgaataactctttaaaaatcaccattaaaaaaggcatttcacatcaaacagagagattgagaataaggagtgaagaacacgaggacctgctgccctgagtttcaagacactaacagaagatttgggtcccacctttggttgagaagaatcaaattagagcatagttatttttcaacttgaggaggttccgggctgtggatatattgtgcttataggaagtaaacaaaatcagaggaagaagtgtatgtgcatcagttggatgcacacaaatcttcagattttcagttgttatccacccaccctggcaatctcatgtacccacaagcctcaaagcagttggtgtcctgtgtccgagggactggaggagcgtaaaccatgggcttcttgaagtcggagcccatatctgggtcatccaaggtcccaggatccagctcattcctgtcaccttggaggtacttgagcagtaatttgtttgattgcactgagcgttcctcagagggcctgtttgtggagacaacctctatgtggccccttggctgccaggccctgtcagccctcacagagtgcttcttccccaggtaccagtcaggaaccaggcctttcccagcacccagagcctttgtcaccggtaatgttggcttcctggggtcataccaggctgggtccaggaagctctggcttaatgccagtgtagttttgcttgtttagaattgtcagatttgataaggcagatttgacagttttttgaagtggatatggaagaggtggcagagagaacagccttctacccaacagcatgctggctctggtacaacttgtaactggaatgcagggggaaagagagcacatacagggaattggctgcctggctgagaacaggaagctgaggcacagatccttggatctcaccagcccgtatcttccctccttgattctttattatattgctcttaagaaatattggaacagacatttagtgtcaggggccctgtgaggttgtgtggggaaccgcctttcaggagttcacagtcttgctggcaagatggtaggtgtgccctggcatgtcctgagatgccccatggctgtggtctaggcagtacgtgccctggtgcctcagaggcttagagatcattttcggctcttctcgtcagggcagatttcatgaaggattttgagctgagatttaaaatgaaataggactgtagtaagtggatttctgtggctgagaaagaagagggcattctatcacccaatacagtggctctaaccatgatggtggaaagaggtaatgggaaaggaccagatttagagaaattaaaagaaattaggaaatcaatagaaaaaacttccttctttccattactatctgattgttttcttcttggccagagtatcggtgtgccttgggcatcagaagagactgtgtgtgtgtgtgtgtgtgtgtgtgtgtgtgtgtgtgtgcgcgcgcacacacacacacgcacagaatagatatcacatccatgtagctgcctgttgtgaaaaggattcagaactccaatattgtagaggactgaagtgtctgagagttaaagatctagagttcagtgtcggctgtgtctcatttgctttgattttggggaaatgtgctttgcctttataatcttcggttatctgctatgtaagtttggaacattacttcatgttttgtaaggtgatgtaattcagtgcgtgcaagtactttatgaacaaataaaaggtataactctgatgctctcaggaagcaagcattttgctcttttcctaaaactgcatagctgacttgggaatgaggcggggagagctggtctctcttttctaactcttctggtaggatgtggtaaagactgagctcctgggcaatagaacactctgcatggaggtttgtgcctacaaatcaaacaaagagatcagccagagagagcctgcctttttgcacacaccgttgggaggctaccttgtgcctttccccagaccacctgcctctgctttctgtcttgttctttatctgtttctctctctcagctcagctttgggcccctggactgttgtccaaatctgaagaccaccctccctgtagatctgccctcctcccctcccaacctgcccccacctgtggaagtttgaatctgagcagaggcattcccccagcatgaacctggacacttgactgtccgcccgcctggagaaccagtccttggtgaagaaagagtgccctctagtgggcattggctggagctgctccggacccacgtcactcagccaaggacaaaacaacccgccacacggccctcccgccaaggatgatcttgactatgcctttgggtttggtttgtttttctccttgtgtgaagaaaaagaaagaaagaacagcaggagacaagtggtgagagcagctcccacaatgctgtgacagtccctttatcttaggacttttaccaaagaattaaccccagggcaagcgatggcagcaaggtacatgtgacatcagaagctttttaaaggacttgtgacaattcctgtataaatcacctacctgtctcaactggtctcttccataattgggtggatttgtgggaaggaaactctttctgtaagaatgattaccaaatgggttaaatatcttcatgggcgcaacccctctgcagattgcatatccactgcaatcaatgacatttttcgggtagtggacgcgtccgggcctgcctggccattaaaaccctatatgcatgaggacaaacaagggatttggccctttaaaacctatttcagaaaaaagctgctggggtggggagggaagagatgagggggagggagagagcgcagggcacccatcagggaagcaggaacctgatcatatgtgatggttgctggattaggtaacagctccgctggttgaaattggatcttggaggatgagtgttaacatctctggtgtcctggcgaaaggttcatttgagtcttgcatggtgctgcagagataaaaaggagcttttaaataatcattttgtctcctactcaccagagtactggcttccagcaataaataggtagcatcagttctgcttagacatatcacccttttcatttatttatttaatgttggtgtttttttttttttttaaccgccgagctgaacagtttgtgtatcagtgaatcccaacacccattcttaatagtggtatatttggattctccttgcgctggctacaaatatgagcatgcaaggttgtttattggtccatccctgtcccctccaagcattacagacacagcccaaatccaccagaactgaattttctatgcaaaatagtgcaagatggttttcttttaaggttttcccttgttcatattgttccttaaaaaaattttttttgggtttttgcacaatcattttctattttcataatttgagtataatttaaagggtgtaatttggaaatgactgttgttggtttttctacccgccgccctcccccccccgcccttttcttttcattcttttgttttcttcagaactctgattggggacctatttatgtgtcttgaactctaagtgtaaatgcaagcaatatttatgccgtggtgcattgtatctatcttatcaatttctaattggccacatttagaaactaagtctattaactcatagtgaattcaaatttctttttagggagtatttatttgcaggattcacaaaatgatgtgaaagctaagcgaaatactaacactttcttgccccagccaacccaccaccactgcgcccaattaaatgtatccttcatacctgaaagaaaagaggcagtatgctttatgctttaagctttgcaaccctcctgaaacttccatggcgggtaggggcttgcagtttatcctttcagtgttctttgccagccttgacaatttcctttcttattttatttaaaaccagttagatttgaaggccaagaaatgtattaattaggaggtgtgtagagtttgtgtgaaattgtttgtgcttcccattgactattttaaaaagatggtgttttaaaaagatggagcagaggcatgaaactgagaggggttggaaagaggaaatattctcagaggttaatattaggtatatgggaaatattcatagtgatgtgtgcgtgatcacctgtgtagctcctggaggagcgaggatcagaactgtctctctgccttgcctctcccttctttcatacctcactgagtttggctggaggaataagctgatggaatgaatgaggccgcttggggtacccatgtgattggaggaggtaggatacttgatgtcagctcaagtaggcagtgcttaacactagccctggcaaggcaagtcctgaccattaataggacatcattcttttttgctttgctgttgttgttgagaccagaggttgtcctaaaatctctcagtgttgggccgcatgcaggaccagttgggtgtggagtagccaggtggacccacttgaaggcattaacacccagctgaagggttaccagcctcagcttcgtggggaatgttcctgccagccgtgggggcttacggcctcttctgaaggaagtatattggacatgagattcagtgagcgaatgagagagtagaattttgccccagcacaatgttttgaataatcgagctaaagtgaaacaactatatttattaatggctcagaggcgattcttttttttttctaatttgtaaatgacccataaatttctttgtggataaggctattaaaatttatcatataaagagaaacaaccacatagaggtgaaggagaggctgctgggcgctgctgccagatgtttggatgccccgagattcttttcggtgcctttagggcctggtattcagggcatggttacagcagccatctactttcttaaggaaacctttgttagtggcaatttgttcttcagagtgcttcggagatttaagtaaataaatttaagaaacaataacgtgactaaatccttattgtgcaaagatcagccaaaggagcagtttcccattcagtctcctgagcctacaaaggaaggattttattggaaaaaaaagtccacaaaataaacctcaatgacctcctaaccttttgccgtcaccactatggcaattttgtttttgtgtagcagaatattacatattcaggtttgaagagagaagatcatgacgtggtagtgttgtggtttgcgtctagggtgcaggcttccttcttttctccttcccagctacctgctctccctcctccctccctcctttccttcctctcatccttttttacttcaccacggagcccaagcttctgccctgcaccttttgtcctctttgctctttatggccaccactgatccacatggctcgccattccatttgatggtctcgtgttttgtgagagccatactgtagttttccttttggcctaggaattgggatttccttctgaacaacgttcagggttggttcttttgctgcctgttggcagccaggagcatgtgggcacagccagcagttatgctggtattatatgtgatgacgctcaaacatctagacataccctcattgagctcatcttcaccttccctgttacaacccgaagccctgctttgccagggctgggagacacctggaactggcactgtccccctggggctcaccagatgcactctgccatgaaaacagctcttgactgtgctctggtgtgtggatatccaccagggacttagaccctgccacctccatccccaaaatgtcaaccaacaccggacccctctcctctgcctttaatcacttccctctttcccaccctacccacacattcttttcaatttcttaaaaattgaaaacactttttatgttccctcttaacaaagacttggctgctgacaactgaactggatttagatgagtgatttattttatgggaggttgtctgaaggggtagtaaaaaagactgtctcgctcttctgctgatttactaaatcactggatctccttcagtccaaatcaccaccaagggtcctggtgttttcataaagatcagccatctcattgatctgagacgccatcctaccagagcactggcttccctgaaaccctggagacagcttgttaaaaggacctcacccttgtttccaacaggacagagtccttatcactcggaacacatagatctcaatgtttggagctaaacgaccctgctcaagggccaatttgtcttcttgctatgttagacctcactctctgctagtccacaggaaaggtctgaagatttcgttccacatgtactggatttgtgtacttcaggtgattttggaaatgaaaaatttagactgatcaagcattgcaaagaaaggcaatgagtgcacaaccacagacttatggaaatttaaaaggagaaataaagagggaaatgcttttccttaaattgaaattaggtagtatggggatgaaagtaaaaaatatattttgttatgattacatttttctagttgaaattttttattgtggtaaaatatatataagatagaatttacctttttggggggtgggggtgtggagtcttgctctgttgcccaggctggagtgcaatgagtggcgtgatctcagctcactgcagcctccgcctcctgggttcaagggattcccctgcctcagcctcccgagtagctgggactacaggcacgcaccaccacgcctggctaattttttgtattttagtagagacggggtttcaccatgtttgccaggatggtctcgatctcctgacctcgtgatcaaccccccactcagcctcccaaagtgccgaatttaccattttaaactatttttaagtgtacagttgagtattattttgcagccatctcaaaaactcagcttcccaaagtgaaattctgcgctcattaaacaatagctccccactcctccccacaactcatggtacccattattctactttctgcctcttataaatttgattattcgagattccacatacaagtggagtgtaattttggaacaaagcaagtccctccttcattttctcaccctctcagtttctctctttttccagcctttcttctattcctcaaatggcatcttgcaagtaacttggcagcttatgtagccaaagaacacaaatgtgttgtgttttttattttctttcttgggttactattaacgctcccttccctgtctttttctgtagttttgagtatccgaggagcccaggaggaggaacccacagacccccagctgatgcggctggacaacatgctgttagcggaaggcgtggcggggcctgagaagggcggagggtcggcggcagcggcggcagcggcggcggcttctggaggggcaggttcagacaactcagtggagcattcagattacagagccaaactctcacagatcagacaaatctaccatacggagctggagaaatacgagcaggtaaccagaaccacctggggctcggcacccaggccctttaggaaagggtggaggaagcacaaccccggggcttgcagagaggagcggctcacctttcccaggtgctggcatccctgtgcccggcatcccctgcccagccacagagccctggccaaacttgagtctgccaagtcctggtctcaactgttaaaaacctaggcattcaatggaggtaaaggcattaaaaaatgtgtgacgctgtaaatgatttcaaggaaacataaatcgtgcatagaaggaacactccatacctggactccagaacgtgtgtctgtgatgtgcaggcctggctctcatccgggcgctataggtgatcagcagagtcaccagctaacctgcaagaaggtgggaggttttctctggcccttgtttttccttatttatcaggaggcctatactttttctgggtgctcatagtatcctatgggaaaggacttaaaacttggccctagagtccctcactttacccagactcagttcaattgagagtcaaacgtattccctcttttacataatatatggtatggaatatgacacaaatcatcctctgtaaaaagggtaggaggttcaggagacccctggagccagacaaactgggattctaatccgggcactccacagatggtttgtgggactcagtgttctgcatactcaattctgaaagctgatgtatggcacagatctgtggatttggagtcacggatgtgaaggaccataaaacttatataaaggaaagggcaagaaaggctgttaactacaaagcagtacatgtagggtctcccgattataacagagcccctctctaatagagaacccccatcccatcctccccacaacacatacacacatcatatagcaatgctagttcctctggttagtgtaagcatgctactttatcaggagtcctttaacagcagcctttcatttagatagcagataagtttgttgttatctcttgggatgcaacattatattgaagttctccattaccctactctcattgaatcattagcttttcttttcttttcttttttttcgtttcttcttttctttcctttgctttccttacctttcttttcttttttttttcctttcttttttttttttttttttttgagatggggtctcactctgtcacccaggctagagtgcaccggcacgatctctgttcactgcaacctctgtgtcccaggttcaagcaattctcctgcctcagcctcctgagtagctgggattacaggcaggtgccagcatacccagctaatctttgtagttttagtagagacagggtttcactatgttggccaggctggtcttgaactcctgacctcaggtgatccacctgcttcggccttctaaagtgctgggattataggcgtgagccaccacacctggcccctttctttttaaaagccaaaaaagaagacagagaaaaagtggaaggtagaagaccttgtgcagtccacttgtaactatctaggtagaaggcaaatgcaaacttaatagaaaatttaaattttaaaatagaaataggcattttaaaaatttaaagtgaataaattttcattactgcactcctatctacctttggaatggatttctacaaaatcctctcttttatgagggcagaaaaattgctgtgaagccaagaatagtgaaatttgaccatcagacaaggtgtagggagggtgaaggggaggaaaataaaagcaagctgtggtaagaagctgtgagtcatcctcctttgccttcttgggaaagaacaaatgttctcgccacagtgttggctcatatagacatttccccagatcccaggcaatgctgagctcagagagctggctgaactgtgacagtttccccaaccatgaccatcatttagaatttgcagtctgctctaacctaaaagggtaattatggaaggcaaatggggacagacctctcgctgacctcttggattcttattacccaatgttcttcctaattcaccttcaccaataaccctgtcctctggcatagcaagctgtcctccagatttgtcctccaggttaactcgtgccaaagaacaggacacaagacaagcccagagtgcgacttccttcactaaaccataattgcaatggatgttaggttgggaggtgttggaaactgtctttaatctgagctcaggttgccagtaatatggaactgcttccttgatttaaaccttcttatcactcttccatcctcatccaaaatgagtaaaaattatgacagccatagtacattttaatagcatgtcaccaattacaaaacactgcggctgacataacggcacttgctcctcaaggcaattttgagattgggtacccaggacaggtattgtcatcctctccattttgatgcaggtgaggaaatggagatgaaagaggttaagatgtggtggaggtcacacatttaatgagggagagaatttgccctagaatccaggattttacccttaccccaagggctcttattagaataatacctgactccactttgtaagaagagaatgtggatgtctttcgacaatggggtaagcaggttgtcctctctgttacttccttgggctagattactggcacctaagagagggttgtgataaaaatattctcttcagaaacttcttgtggctacctacctattctaaataataaagatattggaaattgagaactaaaaagctccatcagtacagaagcaaattatgttcagtgtagaagttgtactactcatctgtatttattatttttaaaagtactaaaatatcatctatttgtttatatgggcattttctagttaagaagtgaatactgcttaatacattttggatgcttaataatttattaatattagttgtgttaattatagtaaatagcagattgtagggaaattatgctattaaccttctagctagtgtgtctgagagatatcttcttcatttttcctgtaacagttccttatggggattttttaaaaatagaaaaccttggtcaagtgaaaatgtcagtattttagtagtacctacctggaattaccaaattggttacttaataattaattttgttgttttatttttggcatggtgatggcagataactatacaataattagctattgtagctcaccctcacccttatccctccaaaaacaaaacaaaaaactacctgaatcagccattgtttcaccctgaggttattaaagaaagaagtcttttgaagacattttttttttttttttgagatggagtcttgctctgttgcccaggctggagtgcagtggcacgatctcggctcactgcaacctctgcctctggtgattctcctgcctcaaccacccaagcagctgggaatacaggcacgtgccaccacgcccggctaattttttgtatttttagtagagatgaggtttcaccgtgttagccaggatgctctcgagctcctgacatcgtgttcacccgcctcagactcccaaagtgctaggattacaggcgtgagccaccgtgcctggcgctataaggtatttaagagctgtcatattataatagataaaaccatgatgtcagaaacctgaattttattccaagctctactttaaaaaaaaattatcttgtggctttgtaggattttttagcttttgtaaataatgctgttggggaatcaacaggactaaatctctaatgttgaactggactgggttaattcagttcatagctaagagagccctaagatcccagttacttttgttgatgagattggcagccaaatccaatctcatccttggatctcaatccaatccatctttttgaaggagtcaaggaagaagataggtcttatagttcaggatgtaaacttaaaccttatacaagacttttgaaaggcttccctttcagtgtctgcttccagaaacaacgttgccctgtaacctgggaggtctattagaaatccctctgccctatggaggcagcctgagctcccagaaagtaactattgttttttatgacagcctacagtagagtctcctctgttgagaaacattcagcatgtgagggttttatttaattaacaattgtaaccccaagtattcacattactgtcacattgtgagtgcctgtcctatcggaagtagcccagcttctttagatacaaggcttgagggaagtgaggaggaggtatgggtagctccttccttcccaggtactggaaaaatctggatcattatgctctgtccatctaaaatgcccttggaactttgctctctgttgtgtgttcctcagcagctgtttagcagctgctttgctccacctcagcagtgggtgaaacgaccccactgtctgtttattgaagagcagaaagggccccgggatagagtgccctgaataaacatcagatattgtgaatatttttattcaccataatgaagcacattattattagctgagcactgtggcttcccagctgagagctggtgcacttgacaatactccctcacatccagcccctcctctctttgagcccagacgaggtggggaggctgcagcccggcgggaggttgtttctctagaaaggtggctaggatgcttgccatgtgcctagccctccactctccatcctgtggtctccaaatttcagctaacttgctgccaggttttatttccttctcttggttgtacagttccaggtgctggggttggctagggaatgagcttactatatagatctcgtgtttatttagcacttttccatggagagtggagagtaacatgctataaggacccgatcttctatggatttgtcttctgtataggcccacagagtaaaaaggaggtatttattaccacctttacttttaccaagagggaaattgaactctggagaagtttacccagttatcgatatatccaaatatgctgggatttctaagttatctatattttgaagagataattgtgacatgtacttgtagggccaggcacacatatagtaactcatttaatccttactacaccttatcaggtagggtattgccatctcggtttcacaaattagaaaaacgaggcacagatacgttaagtaactttgaagatcccacagccaagtgagttccagaggcaggagctgaacccagactgtgctctcactcagcctctctgctgtgttcatgtgagggatttgctcagtctgcaggtcatggcacaagagcatgggtgccattagccttgctgaagggtcaggaatgattaaagccacttttgggtgagttaaatgaagcactgagtagtgaaaggatgtgcccaaatattcatggaggcagggtcaaaaacccaggcctcccattcaccagtgtagacacagcccagtggatgcacctgcctatgtacctttggccaaccaacctcaaaggatttcttagataaataatcagtaaatgtctactattgttattgttattgcgttgtcgacacatatgacaacggcaatgcaatgttatcaataacgagcgtgtttctgctgttaataagttggaggaattgagtctttagttctttaactctcaaagcatcatcttgccttttttgttgtgaatctaatatagttttacagtattgctttgagtgaatctgtgaatagatgttttgttgaatgctcagctaaggaaaccagattatggatgctaagtcatagtaactaaaagagagggcaggagttttcagaggagtaagttcagactctaggaaaggacagaggccctggcctaaaataggaagggctcaggccctacctctgcctcttcatgtttgctgtgtgcctgtggaaatgtcccttcagctctctgggccacttcttcctgttaaataaggaggtggggaaatatgattttcaactccacctccagagctgatgatatgctagtttataacctgagaatttttatttctgcagggatagttcctgaatcctctcaatcatgttttgatgctgtttctgtaagacccctggggacagattccctttgtgttatagacatagtggatcttcagaaggccagaacaggagaggaagttcttataataaaacttgaaacagaaataggtggatgagaaatctcccagaagagttatcaaagcttttaattccataattccatttaaactcttttggctatttatgcattctaaaattgagtatttggaagtactcctatatcagaaataatgagcaaggcagaaagcacatgatacatttgaccccaaactctctttggctgttaactttgggaaaaagggtggtgtagtgtgttttatactagaagtcatattcttacattttactgtggtaaaatcatgggaaaaaaaagattaagataaaatgattaagaaacttttttttctcttaaaaaaatccagcattatcagccaggcgcagtggctcacgcctgtaatcccagcactttgggaggccgaggcggggggatcacgaggtcaggagatcgagaccatcctggctaacacagtgaaaccccgtctctactaaaattacaaaaaaattagctgggcgtggtggcgggcgcctgtagtcccagctactccggaggctgaggcaggagaatggcgtgaacccgggaggcggggcttgcagtgagccgatatcgtgccactgcactccagcctgggcgaccgagcgagactccgtctcaaaaaaaataaataaataaaaataaaaattcaacattatcgccaaaactttgagccacaggggctgaaagggacgtctaccacaaactatcctagttttctttatttgcacaagtctctagaaaagcccacgtggcctaatgtcatagacttgatgcgtgttgaggcttggaccctcaatgacggtgttgattgtcctgccattccaggcctgcaacgagttcaccacccacgtgatgaatctcctgcgagagcaaagccggaccaggcccatctccccaaaggagattgagcggatggtcagcatcatccaccgcaagttcagctccatccagatgcagctcaagcagagcacgtgcgaggcggtgatgatcctgcgttcccgatttctggatgcgcggtgagtctcccatggggctgtcctgccctctctgggagtccctgatctggggctggagtccacagccgctgcccccttcaggctctagtttcaccccatcaacgctgaaccaagtgataccctgaggatggttctgcgagactagatgggccatcggtttcacacagtaccaggaaaatacatggttggaggggatgatctttatcactactgttatgcactctgggtagcagcaaggaggacttaggtacagtgagatttttttcttttcatagcactaggtacctcttttacagttgcgtcttataactatgggcctgcagctgtcttactagcattctatcacgacaggctctcttcaataaagtttattccatttgcttggaaattgggatcttttccacactgtagatggacagagagtgcactcaattcaacaaatattcctaagtaaattgctgtctctgggctaattttaggagtgcagagctgaataagacatggcactttggacacagagggacaaggaggtggtctaacatgggccaacttggtttgatggtttccatctggcattgctgctcatgtccttacttgtgagttcagagcattcagttgaagaaaccatggatagaaaggacctttaaaagaagacaagaactgagaacacagaacaagtggtcatctcttgtttcatctactctctagaccggtagatttatgtgaaaccctttgattccttttgcttctgttatccagcctgtaagatagtaatagtcgtcatatctttcatctactctagaagaatattttgataattcatctagcaaatacattttgattatgggtatgctttgtgatctagagtttgtcttaaattcatcatctgtgaattcagataccattcatatttaaattcttgataataatcccaatctgttatttttatcattgggacattagatatgtcagggtcagtgtaccatttcacagtctataattttgcctcttttcaatgagataaaacaatttattactcctcttgaattttttcacccctgagatcatgttttattcagctctcctacctgcatttttctctgtgttcacaattatggtctttacagtccttggacctctttaaaacgccctggcatcttttttcctcactcccttttagtcaatgtgttttgggttgcatggaatataacatgagaatgccggctagcaaaatgtaactctgggccagtagaattccatagaataagtcaagagaaagtaaaaacgaaggccgttttccccagctgggtatagtaatggagtggaaataggcaaaatcaccctaaagcaggatcctctgtgcctctccctcacccgtggcctgctgtctgccaggcttctgtaatgcagcccgttctgcgtagtgcaaagtgcaagtgactggtggcctctgtttgggtccttcctctgtgccactgccaccctgcatgtattgcttacatctccatggtaactcccctagttaaaatgctggagttggtatttatgttggcagatattgaaaaaaaaaaaaaaaacaattggctccagactgggttctttcttttcaagaaagtaagcagagagaagggaggggcagaattattgtctcattggatatcttctctcagtaattccagtgtgcccagctgaaggtcagactttaacagacacaaagctaggagggttttgtacgcaagtttctttcgcttccaccagcctttgcctagagtgttccagttggcaccagacggacaatcactttaagacagggtctttttcttgctttggttacaacatttgaatcattgcttctgagccaagattcaaaacgaaaacaactaacctattgtcatcgttactatcatttcattttgggggtatatttattaccagtgaaagaacatgaccccaaattccagcctaaggctgagcaaatggccttctcagttcaaaaacaaatgtctgccagacatcctgattggggaattcacatcaatgcctccagcgtcactagctataattgggagagagagctaagcaaacttagtaagaaagacacactcactgcagatattcacatgctcctctaaaccatgcatctgatgggcagggcctcaccaaaaaagatttcatggaagacaaataaaatacaaagaggacttgatttagtaataggattagtctttgtaatctaataggtgtgtagaattgagtgttactactttgttgtggaacactcattgtattagctttctattgctgcgtagcagattaccacaaattaagcagcttaaaacaacacaagtttattatcgcacagtttctgttggtcaggggcctgggcatggcttagctggatcctctgccctaatcacagcgaatctgtaatcaagcttataagctgaggctgtgatctcgtctgaggctcagggtctccttccaagctcgttctggttgttggcagaattcatttccttctgattgtacgactgagggcctcagttcctagaggctccctttctcaataggcaggtcacagtttggctgcctgctttcttcctgagggccagcaggagaaaccttccattttaaggctttaatcgaatcttccctttcgtttactcaaagtcagctgatgaggaacctaatcatatttactatgccatccacttacagggaaggtgtgtacaccagggtctagagttttggaattctgtccaccacacccctcaactaacctttcggccctttatgccactcaagtcatttcctgtctctcttccttagattgacttaactgtaccacggaagtttaacttaaaaattccacacattcattcattcattcattcattcattcaacatttatcatatcatgctatataccaagcattgtgccatacaacttggtaagtttattatcaggactataaataacattttttttttttagttaaaagagggagagaacttataagctctctaaatgattttcgagcattaatcttaactgtttttctataacatttttctggaaataacagtaacacaaacagataattaaaagtacgtctgtatacttcactgcaatagaggggattacataaagtatattgccaaagagaggatgacaagaaagaggaaaggacatccaagaaggtctagtctggtcacactggcactctacttagatttactggcttatctaactgagctcttactatctgcccgatgttatagtagccactggaacatcaaagatgaaaaaagtgcatataaaggtgggtcctaccttcaaagagctcataggacaaatactgttacaactacacagaacaccacatgttacacattcagttcattcatctacctactccacctgaaggaaatgatccagagagagggcctaaaatactgagtttcagaggagcaggatgtttgccaaatagaaggaataatagcaaaataaaataacagaattctacttcagcaagcattccttgagtgcttactatatgcgtgagacacaagggtctcaaatatgagtgagatctgtcctctgcctttgaggaatttgctgtttagttggggagacgtatgtaaatctgtggcggatgttgtgggagagaaatatgcagggtggtgtgaaaagccacaggagcatgaaagccacgagtctttggggaacgcagaggcatatgatgtggctagatgaaattgttcagagcatgtgtaggattgaggggaaatgaggcactagggataggaaagatccactgaaaacccttaactgtaccagtgaagattttgaatttatcctattaaacagcagaaaccctcagagctgtttaaggaagatgtatgggaagttatcacataaaattgcactggattcaaattctggctacaaccctgatgacctatatgacgctggataagtggcttattttcccaagactcagttttcttacctgtaaaacagggataatcctgtaaataggaataaatattagtatagtatctggcatataatattcacatcataattcagctatcataatgattactgtgttatatattattactgttatatgatatattattgtacattgttatatatatacacattattgttaaattttataatgattagtgacatgatcatatctgtggtttagaaagattagtgattctcttgaagatgagctgtattggagaaaagacaatgtaaagaacaattattgaagcctgtgctcctcaaactggcactgcacaggataaattgaaatacttttcacattttgtgtaagtattccaaagaaaatattcttattttaagataaacattgatatattataaagtggactaaaacaagaggttccaaagatattttatgtttttgatggtgtccccagagctacaatctttttccaggagggcttcttaggaaagcattgatctagtgttgctctggtatatagctatttatttttaaatttaagttaactaaatactaaattaaaataaataaacatttaaaaattagctctctggttacactagccacattgcagctgctcagtagccacacatagccaatgactaatgtattggacagcagagatatagaacatttcactcatcgtagaaagtactcttggacagcactagtcatacagtgatacaacaggcagctgctcctcttcactcacttcacaaatagcagcgcaattagaatgaaacagaagaggtagatttgaaagtgtagaactgtcaggacatgctttgggggcaatcatttgatgaaggtaagaaagcaggaagagttgagaaactcctagtttctagcacatgctaggtactccaatctttgaatgaatgaatgaatgaacaaattagcaaatataatgaaccatatctatagtaatgtcaccaaataataagactaacaaggaaaatggagctgatttgggtaaaaggtgatcttagttttggaaacagtttgtttgaagatgcttggagtctgcagtcataaatgggccaatggctcttagcagaggtattagggcaggagataacaaatttgatagttagcagtgtatgtctgtgatgtctacacatctcactatcatgagtcttttataaaaaacttaccccatggaccctgtgattcaaaaatattctgtccctaaaacaccatatttatccagtaatattttatcagcttccaaatttcttaaattcaaaacctagatgcccaactcacaaagctactgattggtttgaaatcacaaatgttaactcagcaaggtgataacacttcaagccaaagcaaagaaaccaggtgtctcagttagctcaaccttattgtagaaaggtgttattttcactaggtttcttgaaatttggaaaaatcctgatcctaggatttcaaaggccctagattaagacagctactaaaagaagtgataagcgagtccatcagagtaggtgagaccacctagggaagattgcacatcacaaggagagaagagctgggaacagctgtctgcaccatccgcataccaccagctcattccagagaggtttcctttgagttcaattggaagagtcccaaaaaatacacagtaatgctaatgcaaacaactgaatgaaggaacggaggctctccaaattagggagccttcagggtccagttccccaggcctaaaacaacagtctttaggcgaagaagaaagagaagccaaaggttatctaaagcctggcctgcagaccctgttagtcacttggctatcttcctcaaattcccatcatgcaagagcttttaacacatgcccactttgcagttaggcttttaaatccaatctgtacaatttctgatgctgagtgacccagaaactcagcatgatttaggagagtgacttgggcttggcataatctggacagatgtggttaatacctgtggacagatggtgttcttccggtaaaatcaggcacttcattgtgttaattaatccaagtgggaccctgaaaatacaatattagctgaatttcctgtctagcaaggccatcagtgctttctgttggctaaattgggaaatcctatatcctggtataatcagggatgttctggaaatcttttccataaggaaaagcttttaataaaagcaagaaaggcaaaagtgctaagtgagctaatttaaagatgaaggccacacaacttcaaggagggccaaccagcccctgcattgagcctgcaactccctcaactatccacaggccttcattgtcaggaagcaataaagtgattctcactttaaattagttcaattagcactttttttttaaggcagaaaatgcttttattaaaaaaaagtgattttctcctttttggcaacctgtatatgaaaaagaattctgtgggcttttgttttaccatttagcagctgttcttgcttaagaagtgccacttttctccttttgagggatgtcaagctgttgggggttaatttcagtcagttctgtgccctcttccccagatgccttttaaaaatgttacatgcatttacatggggatagaatggaaagaacatgataacttatttttaacttatggctgcagaagctctgcataattgtgaggagccaatttgtatagaagagagagattgggttttgtagtggtcagacctgaattaataccttagctctgttacataccagccaagtgacctttgagctcagttcttcatcggtaaatacgaataatcatatctgcctcagtagtagtgaaaaatgaataacttgaattgattgccaagagggaggggtcaggcccagtgcctggaacctggtaggaagaaagaccaagttgtagcagctgccacgtgttgggcgctgtgctgagtgctgtctttgtgtggtctcatctcttccctactctcaccctgtgaagtcagtatcaccctcttcactttcacggaagaagctgatcgaaatcacccagctgatattcaattgaccgaggattcaaaaccaagatggggctgggcgcggtggctcatgcctgtaatcccagcactttgggaggctgaggcaggcagatcatgaggtcgggagttagagaccagcctggccaatatgatgaaaccccatctctactaaaaatacaaaaattagctgggtgttgtggcacgtgcctgtaatcccagctactcaagaggctgagacaggagaatcacttgaacccaggaggtggaggttccagtgagccaagatcacaccactgcactccagcctgggtgacagagtgaaactccatctcaaaaaaacaaaccaagatggcccgaattttgaaactttatactcctcactactctgcaaaaatatctgtgaccactcttctgttcggtgcccagatggtacacaatgaagtattgagcaaatgcttttagcgttggttttggcatccagccccttttggtaaatctgctccaaattcaccttttgctcaaaaatttgtcttctcccagaagtagatttattctctcccattttatatttatttggtgtgagcctttttgttattatttcctttctctttacaaaggcggaagagacggaatttcaacaagcaagcgacagaaatcctgaatgaatatttctattcccatctcagcaacccttaccccagtgaggaagccaaagaggagttagccaagaagtgtggcatcacagtctcccaggtaagcagcacctcaaaagcctcagcctgtagcctggccatggcggggcctccggggcaggctcttagaggtcttgctttactggacattcatgccttgcaagttccatcagctatagccttaaaatatcaaggtaagcacttgatgtgtatgcgtataagtgagtttctaggtaagtacttggcaaaacttgagaagaaccagcagaaggaagagaagaataagtagagtacaatgtaaaaacaggattagggttcttcccatcgagcactcctttgcttcaaatgggtgaggtgtctaaagtgtactaggaaagttatctgcattcctcatgctgttttttcaaattcagtcaattccttagccattttttgcccaacccaggaactttaagagtcagtgaatggaactagttgttatatagccttttaaatgaaagaacttaaatgtctcctcttgatgtgctgactctataactgatgggagtgtaggaattttaacatgtcactgcgattacattggaatggtgaacaaaatgtcactgaatgcccccttcccccaaagagcaataaccataacaggtggtgtctgatgacttggaaagatacatgacataaaatttttataggcctagagttttcaacacgaatatgaagcagagaagtaggcaataattatgtgtacgtgtattttgtccactcaaaagatccacccaaacttcttattcagtctgaacctcaaataccaccactggtttctaattgagaaccatagtgataattctgaaatctatcggagaaggtttttcttagaattttgtcacatgcaggagaattaaatgtactgatatttccattaaaactggggaggggagggagtagtgaaggctactgtagcgagaaatttcacttaccatttttcaaatgaagtagatgctcttttatataaactaagcatctgtacctccttgaattgaatcctgacttctgttaatccctgcagggtgctgatcccatcaacctgtgtttagctgtacagaattaggtccagtcagaatatagagctccacaaaagtattgacaatgaagggactgtccaagccttcccaacaaactaagatgattttacagcagcaaatatccttgaaaacattctttcagataaagcagaatgaattgactcctttttaacctgggccttccttaggtgctttgacccagctggaggtcatttttagtcttgacagttctgggaaacgggaacgtcagcggtcaaactcaagtagcctagttttttctagggctgtcaccattcttatccaaatctaaaccccttttccacaaaaaagggaattaatgctttttgatacttgctacatgtttgaggaatgcttctaggtatggaccacaaatatgcagcaaatatcaaatcactgaattttatcatggaaccttctgcttttaaaatataattaaattactactgtctgaattccaagtgtggaattcagaatttcaacttcctgttgaaggtaaaaggaattctcctggaggtaatttgtagtatagctggatacaagttaaaatcctgatctgttcccgcaaccttcacttccttcattatggaaactcaaggtacaaatagtgtgtccattaaaatccttatttacatattgtgtcacctttccctttcctctgtccatgccaaagtcatgccattctttcttccccatcacatctgtctctccccaaagcaactaagctaccattgctaaacaagtccaatggaagacagtataatatgatgtcatagaaggagcattaagcaaggagcctatttttgacaagagtcaactgtgggatcctagggaactcactctttctttttggatcttagttgccccatttactaatcatggtttgttggatcacatgatttattaaatctttctcctaattcccaaagccagggaatacctcttgggctgtatcattattgtctttttttgaagtcacaaattcttttgaaatctactaaaagctattgatttcccccatgacccaaaacaaagatatgttgcccatacacccaaatccatctgaaatccgcctattgactgtatctcctcagatccctaaagagccctttttctataccagagctactctaagtgtgatccacagaatgcagcatcagcatcccctgggagcctgttagaaatataaattcttgagtgtcaccctaattctgaatcagaatctttgagggtgaaatctataatagaaatttgttttaacaacttccccatgaacacttaactttgaaaagcaatgttctatatgctttatctgagtgatcttttccatgctcacagctacaaataatacctccatttgaatacctaatggaacttctcccctgcagcaccaaactcataaattttacttcctaatggacttcatcatggctctgcccagaggttcttcaaaattaacttgttcaaaatgtgaatcaaactcttcccataaaacctactattctttctgtatttcatgtctcattctgtgtctgttatctatacatccctagtgcctaacgcgtattaggcccttagtccatgactgttgagtaattagttcattcatgataacactcattttatacattgtccagatcattgtctgttggacaatgcaggaagtccctgaactgacctagcaccttcctaccagttccattgttgtcatttagaagggtatcattcccacaacatgtcccctctttacccccttcagctcatattttttttacatataattggacctcaggtatttcttcttcaaaagtcctctgaaattatcttcatctttttcccttttctttcagcttgtgcagttatctgagaaaaaaaatctccttaccttttttcttcttttcctatcccataaatcaaaaagcaaccataattatgactgattcctatgaatagtgaaagttatgtcaagaaaaacataaatttcaaagtgaaactagatatgcagtgatcctgaaatacacccaaaagtgtccttcctcctccagtttacctctttttctgtagacatcagtgtttacaataaataaagcattttcttattgaatttttttcttttttgtttaatattgtggtggtacagactgatttttttttaaaaaagaaaggcttggcatttctgctgtagtataaactgtataagcctttcagtgctatccttataagatgttttaagtttgttaatgcgtttaaaaaattaagtatagttttgcaacagttttctttatctgccgtcgttgggagttaaatatcaatgatatgtaagctgtggtacatgtgggatcaactcccccttccctcaccagattcatagtttgttttgtaattatataaaaacatcgacattttagttcaaaatcatatctggaatgtgggatataaaactttccttccccgggcaggaattatgggggtaaaacttgaatttaactgtgtctccacttgtgtctggcagaggtcttggtatgaagggagcagaggtaccagatcaagccaagacacctgctgcgaaccacatgaaggaaataaattaacaaatgaaagtaaattaggtttattgtgtctgctggctttaacatttaaaccctagaattcaaggggataatcatttgtatgctacagtttttccttatgtagataacactaagctttacacaaaatagtcagtgaaatctggtagattgaattatattgatcctaaggtctatagtgaaatacagctaagaatctcagtccacattaaagttatgtaacttctaaaaatttgcaattaatctatcacacgaaagcacctatatggacatttaaagatctgtgtatcttgatggcatcaagccagctttcacattgataaacgctaggggcatttctcctgaaatgttaggtatattttagtgtcataactgaagatgtaagcaaatttaaaatgcttgctctaaattaaaagggttctagcttaaatgagcagctcctttataggaagatttttgtcacagtggtttcgctaaatttcagttatattaaacaagagaatcgcattttatgtagttgtccttttgaagctcttacttcagatctttttactgatgttgccaaattattataggataagaccaattagcttacctcttcacctctcccataaagccttttttttcttctgcaatgtttctgaaggatgaaatgtgaactttctcatcttctcttaaactactctaggtatcaaactggtttggaaataagcgaatccggtacaagaagaacataggtaaatttcaagaggaagccaatatttatgctgccaaaacagctgtcactgctaccaatgtgtcagcccatggaagccaagctaactcgccctcaactcccaactcggctggttagttttttctttgattgggggtgggggaaggaattgttctccatttttatactggctgttcctacattgggattttcttttaatttgttaggcttttgattggttaatttctgtatttgattgtatttttggatgttaatgtcactttgggctctttctttcatttccaaagagcaatctgttagactttttacaacgtgggttgtctggaggtttgcattaatttgtctattaagttaagaccaaagtaaattggttagcttgaagagacctctaaattctcctctcagggatatcaataagtaagttagacatagtgcttagagatagtctattgggattctgtcatttggcctgttttatataaagcttttatccttgtcagttttgctgttccaacaacataatgtctgggtcacttattagcatgcattctatgcagaaatatttactcttctagcaaatatcttattagaatgctttggtatgcaaagccaggctatgaatatttctatatattgtttatagttgttgttctttattgttttttgttggtcttctttatgattatcggtcatgagctatgtaataggctttgtttcaggaaatatgcattatatcactaatttaagagtttaggtcaaaatactatattttggggtgtgccttgtgtcatcagttcagaatttctacatgtgaaaaaatgtagttaataatgcaaaaaatataacctttgtgtttgtatgctatggaaggcatgtggtaatttttttttccctttggtaaaggaaagacaagtattttctcattaaataagtttggtttgactttgattagggtgcacagctaagaaaactgatgattctaacttaaaagtttaccaatttaaatatgtttgatcgtaatatgattacaaacctaatgtctaacattttttagagtatgtggtatctttgaccacaaagcttgtttgtccactaaaataagttttcttacagcgactcgttactggagaaatgtagggttccacagactgatgtcttctgtgagcttccagatgcataaatttgttatgataaggtcctccaagtcactgggctatacccagcacttcttttgtggccttcttttatctaaatggaatcatgcatgaagagtagcctgggctttttcaacatggatataataaaacaatgtagaattcaatccagttttaattttcccagcactgcaggttagattcctatgaggagcatatttacttttttagaaatattttgtttttttcttcctccatcatggtgtgattgacaagggatcaaagctaacaggttcaataaccagagagagttccatcttctccatctggtcaattattaagaatttcagacccaacaacaccagttgaactgtgctgctaggcagacattttcacttgtctctttggaagaagtacaattctgtcaacattagcaaaaatgcactcaacactcctgcaaaggttatcataatgcaaaacgatatcaaaatgactttttcctgtccctggtatatctgcatcgcagatggcttagcatgatttatgactagtccttagaaaagccctgtggactttcttcattactaaatttgtaactatttattctttcctaaagcccttaaaagagaaaaataagcattttaaccctctattctgtgtttaagaaatatggttgcctcttatggaatgtcagactatgattacagttttctaaggaatttttttctggtggcttaaacatcatgtgactattctgagcacaaagtaaattattatggaaaatttgagctaagccttccaattgtgcgtaagttgttggaaataatctgcacaggaacccctttgtagtgctttttctaaagtagaggcaaaagaaaatactattgtatgtgtgcaatagcatggaattttaaaagataaacattttaacaggaaaagttataaatgggcttttctgtattttcttttgctcttaaccaacctaaatcatccacacaggtaaagtagaactttaaaatgttcaaacttttcacataaggtgtttattatgttatgtacttgctcttcaataatttggaaagataaatgataattgaaataaattttaaataagaggttaatatgtgaaaatatattttggcagagtttgaagtctagagttgtagaacctaggaacttttcataacctcagtattgaagcagaagtttttttttcagagttttacaaaatataagtactcatttctattgtaaagaaatatatttctggctgggtgcagtggctcatgcctgtaatcccagcactttgggaggccgaggcgggcggatcacgaggtcaggagtttgagaccagcctggccaatgtggtgaaaccccgtctctaccaaaattacaaaaattagctgggcatggtggcgtgcacctgtagttccagctactcgggaggctgaggcagaagaatcccttgaacctgggaggtgcagattgtagtgagctgagaccgcaccacttactccagcctgggcaacacagcgaaactccaactccaaaaacaaaacaaacaaacaaacaaaaaaaccaaatatatttctttgcaagtaaatcctcttcctgctagaggcttctgtatggagaacagcacttcagtaagattacttccaaatatttctatttattgatatgttccatgtctcctatcttcttaagcataattttttttttaaatcacttaagactaaaacccggggggattagcaagcatttagagacatttagcatgcttcatagtttataccagcaaagtgagacaaaatggatgaagcaaagaggaagaatagaaggaaggagagaaagttaaattttgaaaaaagaaagcaagaataggggccagttgaagcactggttaaaacctggggtctataattcttctgtagtggcctagagtaatgcattcttaatttcttaatttcgatgagattataaaacctcagaaaaatgaggccctttcaagaagcttggattatcttctgcagaggattttaacatccaagaagaaagaaattgacttgtgcattacagatgttcactgtggcatgccatcagcgttgaaattatatcacattctgtgattagatcagtggtagtgggcttactgaagctcagaaccccaagattggaattcttttgcttagctgtgtgtttgtgtcaaggacaacagcaaattcaaccatgaaagttcttcctctagcactattttagtcaatggcaagcccatatacataatcttgtaatacccctgtattagtccattctcacgctgctatgaggaaatgcctgagactgggtaatttctaaaggaaagaggcttaattgactcaggttagcatggctggagaggcctcaggaaacttgcagtcatggcagaaggtgaaggggaagcaaggcagcttcttcataaggcagcaggaagaagtgccgagtgaagtggggaagagccccttataaaaccatcagatagatcttgtgagaactcactcactatcacaacagcatggaggaaactgcccccatgattcaattaagttcacctggtctctcctttgacctggggaccgtggggattatggggattacaattcaagatgagatttgggtggggacacaaagtctaatcatatcaacccctaaaaagaggtttggtgtttttcaggattgatgaaaggttattatattaaaactcagagccttcatgccctatgagaagtttttatataatacacacagagagaaggtaacacatacagagaagttgactaaaactttagtaaatccacaggaattcttataattttgttttttaaaaccaagtgaaaatatttatcccactgatgttttatctcatgtctttcttagtatgattctcctctttatttttgattgaagagtgaaaacaatttgtcctggaattggaactctacaaccttgagatacatacctattgaagggttttcacattcaaccagacaacactttactcttttgctttgtcccaagtagaaagtaacaatgaattttggaattcacaaagggaaatggaaaagcaagcatgcatgggacataatttaagcttacatctagtaaaaagggcctatcctttgagctcccaaatggtatgagagtccaatctaatcaagctgaatcaggctggccacataatctatctgaagtcttgatttctaaactacagaaaatggcaactacttcattaaaatactgtaaggaatattgagtgaatacatttaaacactgaattccttaaaaggaaaaagtaaatccgttcttgctctaggtcttttgttctcatctaggggcaaatttgtactcccaggggacatttggtactatctggagctatctttggttgtcacaattttgaagggaggttgttattggcatctattggatagaggataaccattgtagggctaaccagcctacaatgcataagataatctcccacaataaagaatatttggcccaaaatgtcagtagcaacaaggttgagagatcctattctaggtttaagctttatcattattattattattattatttttggattatgaagttaactgattttttttattgttttttgcttttaatttttttgtttttctttaacaaatttaagtctcctgaagattctttagagtagaaatgcaattttctggaacttgtctgatgaaaatggatgtggacactttaccacatcatgatgtctgcccaagcaaatgcattataatcataagtgatccagtatttcttctctgcctagttgagtgtagatttagttctgcacatgccccaaatgtctgggtggcagtttaaatgagctgcttgccttccttcccaaaccaaattcagaaccttttaactgacaaccacatcttaaaatgtgcttctaatggtagctgatggcttcaaaacagcctgcaggtaaggtttctgaatgatcttctcagcaagccaagtctttctgtttcagttctttgagaatgccacagcacctccaagagagcccattcactatttgtcagtggatcgtgtgcttcccaggaggttatccattccatgataaattctttccaacttgcagtgctgggtagagaacatgtcctccccttgtagttcagatgtttttgtggacttccgtctgcttcattgtggtgttagtggcacctggtctcttccctcagcacagtcagtgcttctagatacttatcagagagtgagaagccatggtaatattgtacatgggtgtacagacacaatgaaatgctgaaacagcacagccaagagcacaagggactgtttcttcaattactgctctgatacaaatgcacttgtatatgaagtacatttatatatgcatatttatctctgtgtacattaggcagccagacatatttacagtttatgcacatgtattttttaaatcacctgtgtcaattgcaatgtgtatcttttaaatgacacattccatgccttcatggttccatggatgccacgtcattggacatcatgtagccctttgggggtttctcccatttctaagtttgtatactaatttccagaaaaacattggtcaaacttatagtccttatgtttaggctagatttaccacagtggaaccagtggaatctgggtggtgccaggatggaccttaaggttgactctctgggtgatgagacatcatctagagacgatgggagagaagtaaaatacgtgagcctgaaactgaacactctggggagttgggtgggggagtctgatgacatataacaaattataatttgggttcttggagctgattcttcttggttctgatgacatctaaatgcaagcatgtattgtaatacattacaaaatgacttttattatttaggttatatctgtgattacaaaaaatatttgagagggatagaactagtatatagagatattatatatctacacgtgagaatgtgatctgtgccacacattgtttcattcatatgttcaggaagacagtttcaaagataggtcccatattaatggaaggaagttacagaccaaaggctttgtcccactgactgggtataagccacacctggccagatcttacacttgttttgctaaggccctacctttctaattcctttcagataagctaaacagagaaatgtgggccagatgagacaggacaagtcgcagagctatggagatggcatagtcctttggttgatgcttgagtcctcctctaacccccaaagaaagcatttattttttcctgggaaagaaggaatgagaagggagttaggtggaggattgttttatttagtaaaatagctaggttttttttgcatgcaaatgaacatcccacaggacaaagaaaattggagtttttttttttttttaatgttgagttgtccccaggtttataaatcatctgctttctctaaatggctcttgcctttaaagtatgaaaacaccatgaatagcctagatagataccataaataaacagtgcattgtgtcagagtttagagttcatcatttgttaagtggtccttctatgggggaaaaaaagtcctctcttctgcttagctgcacctcttcatgtggggcaggaaagctctcagagctcaaatccctaccttaggagaaaagaaaagtgtcagagctgaggcatgaatcattgttgggtgattccacactgatgatggctgtctcagaatatgagggcaagagcacaatttgagcaatatagggttggaaataatagagtgcaactgacctgggtccctaaggtctttccttttccaggctaatgtcatgttttaaccaaaccttgcacgttgagctttctttcctaatgcgctgagctgcacgatgacttcagaataatattaagcttttgcaagcccttatgcttaggttgaatgtgggctaggttcaccgcagtggaaccagtggaacctgggtggtgccaggatggaccttaggctaactcactggatgatgcttccatccctgggaggtgaaaagcagatggctaatggcccttcttgaggcccacttattattattattactattattattattagcagcgatgtttcatattttatgcatgcttgagaattcctggcccattattttgttttctctgtagtcacaggtggcagagaagggtagatcactcccacatattcttacagtcctcaaggttccttgggctgttgccaccctgcaagaaatttcaccttcattttagaaattaagaatgtcaatagacccatatcatagagccactcctagtaggtgacattgccttcatgcactccctcccaggtgctgctcctcacaggggaggggatggtttagcaatgacatatttagaatccagttgaatagtttatgtgctctatcatggtggcagaagtaccagtgaccagcccatagcctccatcttgtggtcccctggccaaccctagaattttagaggcatagaagagagatcctaggtctagagactacaatccaaatagactaagttgggaagaataaaggttccctttcttggcttgaagttgccaaggggaagcagttctattgacaacttgcagtaaggtatggcttcacataacataaacaatatgcaccctttattgcttgctctgttcttcatgctactaaccagactctgttgatgttatttttattttagtttttatttggggggggttgctttgcatgtcattcttcctcttggctgttagttgcggggtttgagccttttcctttctgtgattcaggtgcctcactctttcctttccaggttcttccagttcttttaacatgtcaaactctggagatttgttcatgagcgtgcagtcactcaatggggattcttaccaaggggcccaggttggagccaacgtgcaatcacaggtagggacccagccaatatgtcaccaggtgaatgccttagagtccaagagccctcagttgtattggacttcctgcttctgtccagagagagagagaaaaacagatcagaaccaaaaccttaccaacgaccgaaccaaaatcaagacaaccattgtcatggggaatctcgtccacactttgtgaatgcatttggctctggcttttcagttgtacttggaaggcaggagaagaacagtaagcacagggcaaggtgaccgagacacatcaggcaggtggaaccagcatattctttattcaccaaagggaaaaggaggaggtgttcaggatgttacctcaatttccaggtctccctctcatgtgttggtttctcctgctcaatatttaccatataaagaggcaattaacaagcaagcaaatatattactatcggacgttttcattttaagctttaaaaacacccagccaggttgactaaatacatttcttagtcatccttgaggtcaagggacttgagtttctggtgatgagtagaagtccacattgggaagcaaaatcaagccatgtgatatcaaattttagtgttccatagtaagcagatttccttcatgatacttgaagaagccatcctactacctcagcatgaaacatgttgtgagagggtaaagtagtatgctgtgggtcagaattactagggaagttctgagccatgtcagcctagtttcccaccctccatgtggaacaagaagcattacaagcccggaacagaccaactggtcagcgattcacccctttcttgagaaacattgcctggaaaccagtttgaagtgatatggtcaggctttggtcaagtgactaaacaactggccatcacttaagtcctcaaaaaatacaaggtctcaatcaagtactgctctctctgtgagatggctgcccaaacctcctctaaacagaacctttgtttttataggatacccagcaaaggaacagctgtataggatgacctgtagggaagaaaaatggggagaaaagaaaattccttcatgctttcccctccagctccctctatcatcctaatccttaccatctcatgcagacttgttgaactagtttcaatgtggagatcccagttttcttttaccattttacgtcttgcttactgaactcagaattctttatggattggcatacggaggaagctagcctcctcctaatggactctcccaggacaactgtctccaaaatgattgcattaatatggcatgcccaaatggtggcctgcctgatgatgatctgcctcccttttcctacacctctctgactaattttctctctgttattgttcatctgtttaggtggatacccttcgccatgttatcagccagacaggaggatacagtgatggactcgcagccagtcagatgtacagtccgcagggcatcagtgtaagaaaacaagcccccccaccccctgctttgtttttattctttcactaccaattatttcaaagccatagggcccagaatgccacttagtagggcttatcttagctttacggtcacctagtttcttgtttctgtatcggtcatgccatcggcagcattctacccacaaaaaaagtggcgattgggcaggcttcatgcaggcagctggcgtctagggctgtcagacgcaatcagtgtttgcatggcacctgcggccacatgcgttcagctagaggagctgctaaacaggtgacacctagtacaacagtggtaggaaatgtgaccacaagctggggcctgggaacctgggaggtgaaaccagtagccaaaatccattgcatccacgtctgtggtctgaaaaaaaaaatactttttttcaatctgtctatggacgattaaaaagaaaattaacacagaagctgggtatgtagaagggatggggagggatgcagaccatcttctacttgttcttgggtacgctggcggctcctgactagcatgaaaattcatagcgacaagctatgtcgcacagagtgaaatcgatcagacagacacaaggagaaccgagtgtagatttgggacagcaatccaacttgatttctcagatcaatcgtctgctttctcagcagcggtgacagcaagctgggacaagagggcagcctggaaaaggaggctgttttttagatcagggatgattcctgggcttttagaggtcacaggaggcttgagtagaactattggctcttaactattgaagaaaggtttgggtggtgggtagtgatcattttttattgtttgtttctgttgctatgattaaagtgaatgagggatcgaaggaagaagagttaggcatgatttattaatgtaatctatactaatggagatataatgtctgcagtgaaggaggtgatgacctcttcaactgcgttggtcaagtcatacatgattctgtctggtttgggaggattaagagaatatcagttatttctcagatcagatgaggaatgattgaacacattaggaattcttacctcataaaagagaaaatttgggggttacatagtagtgtaaggcatgctaacactattagattcatcatgaatgatctaaaggggttaggataggataggactactaagtagtggattcagagaaacaggtttcacttcaacatctgatggacctttctcacagtaagagtcctccaaagaaggggttggctgcccttaagtgttccccatcattggaaaattcaaacatggcttggctagctgcttggtaaggatgttgcagaaggaagtcaggcagcagattttgattgtcttgatgacttttaaggccacttacattagggagtctttattttctacctttttcaggcagaatctcctcttgagtttacacaatatttatcaagtcttctctggaatggaaggagagaagtcaaagttaaccctgttaaacatattctagacaatcattttactttcttggaaggatttttaggacagagagattcttcccatcttgtgcttgttctaactacattaactattagtactgcattgatggctgacttactgggaagactgcttggaaaaatacaagaagccattgtgggaaagtgtattctccaaaagaattccaaatgaatgaagttgtttggattttgtctgagtgcaggtttatacacacatgcatttatgtatttcctgaatctttttgggatataagtttttccagagaaagctttgctctgtgcataagcagaagagaagaacatgaggaaagcacaagagtgtagggacaagaacctggccatactcaaaaggaactgaaggaagtccacatgactgggcaggaaatggggctgacactgctgttatttggcgtctttctttcctaattgggcagcatagaagagagagagcagcagtcagactctggggggtgggggggggggtcaacactgacccctctgacatcatctggtgggctgggaataatttctgaaatagtgtaaccaaacatgtgcagacaattatgtctgatgacataagcccaccacaaaaactgggcctgaaaatgccacttgaaagagtctctcactttgcattaatttttttttccatgaactgtggttattttatttctgggtctttaatatgcagggtaaatgaatcaaaggctgatcgtgatatgttcttttgatatcagttttaaattgtgccacctgcaggaggctaagcttgttatagtgagatgtatttttagatggtggtattcgatgctaagacatgtgtgtatagagcaggacaatgactgccagcaggagagagagaggaggggagacaagaagagacaaggacaggaatgaaagctttgagccaagaaatgaaaataaacagttcctaaccccaaagctgcagtggaattcccagctgggctctggattgtgtttgattcggtggaggacattttctgggcagcgtttatctgctcccctggctgggctttcacagcacccatatcttatccaagcagcatctattttaagccctgtaaagttcagaccatttgcctttaactgaccacacagcagtagaattgcaaggtgcggtggtaggagtattataaagggagttgggagctgctagtcctagtaactcatgtgcccgtgggcaaatattgaatctctcttctagaaaatggggacagtaattcccaccctttatacttacttcaaggactggcttagggcaaatgagaaaataagtcggaaagggattggcaaagcataaattattccacatgaatgcagtatgaaattttgtaagtgataactttctgatttgaccttttttctcctctgatgtgagcagttttctcagtaggtagttcctagtgaggataggttaggacacatttgtcacttttttttctcttctgatggaaaggtgtgcttttgagatggatatagtgttatgcaaggcctaaagacccccttccttagccatggtgagagttaaattatacctccttaagtactttgtgttctcatgtgacaatgggcaatacttactaagcttagagtggctctaagtaatggagggagattactccacttctctgtcaatcagacatacttaaagatcacttagctatcacattctttcctatccattctcactgccaccatcctagttctagaaatagttcattaactagactattgccataacttcctaatcactgttgctgtctttaattcctcctctctcccacacaccctctgaattttgtcattcgttgctcagaaatctattgcctacccaagcaagctcaaaccctgagtacgacattcagggtctcttacatctgggcccagccttcctgtccttctacctcatcctcctgtcatcaaaataaactctggatgccattcagtatggccagctcatctttacctcattacccatttttccccttacatttactcatgtatgccatctacacaaatgtcctttcattcccacatcacctctccatcccaccccactatccaaatcacactgagtctcaagcccagctcctccttcgtgtctttcttcttcttagtccttctccccctcttctctctactttatcacagacacacattttctttgcactgtacatacatgcgcagaaattacctctgtgtctttcacttctgcccatgtgtatggtcctaaaaatgcatgttctagttgctcaaaacatgttcgttgaatgaataaatcagggaggggaagaaaagatgctactaaattaaaaattcattttaatgaccaatagccacatctagtgtaccagctataaagtatctgatgagaattactactttaaatgcttatccacaattatactgtctttaagatccaaaaatatccttaagtctttctttttggaaaaagtttttcaaactttccggctgatgtatattctctgagaataagattcaaatcagcagtaagtgtgtgaatttatatggtgatgatattgcagacataattatcctcagcagtaggatcattcttattatgaattttgtaaaatttctttcactcctcctatccttaaagagtccctgtgtttctatactaaaagaatccctgtttaaaaaaagtatatatacctgtttgtaggatagccatgcatgtagcaacatagtattgtttgtgggatagctgtgcatgtagcaacataacattgttgtaactggattctcattgttgtaattgccctccctactagatgtggtattggaacctccaaggacaacctggaggaaggtggaagcaacttgaaattgggaaacttaggtccttcttgtgacttttcttttaaggagtcacttcacctctgtgttgttgcttcatctgtaaagtttattagataagcaaactgaaagctctctttcagctcaacagctctagaattctacatttatgatctttgattcattgttagctcaagggacaccagactaaattgtagatcatccctccagaaaactctttcattagagttagtaacttctattctttctagccaaccccagtgttcaaattatatcttgaaacccaaatgggaaggaagaagtgctctcgttacacaaacttttccctttgaattccttggatatttgtgatagcagaaagcattattctttagggtaaaccttttttgtttgtttgtttgttttctttttttttgaggcagagtctcgctctgtcacccaggctggagtgcagtggtgtgatctcagctcactgcaacctctgcctcctgggttcaagcgattcttgtgcctcagcctcctaagtagccgggattacaggtttgcaccaccatgcccagctaatttttgtgttttcagtagagatggggtttcaccatgttggccaggctggtctcaaactcctgacctcaagtgatcctcctgcctcagcctcacaaagtactgggattataggtgtgagccactgcacctggccactatatttaattgttttaaaatgtgggttatgggaatgaatttactccagccagtctttgatgtaaatagatacccctgtggatttttcttattcaaaaggtttggtgaaaatggaaataagtgtcagcattatctctacaaaggtaacatgccgttaacatcaatttatgacacaaaaaaaactcattaatcttgctttgtaatcattatagtaatagaaaaatagagatgaagcttttatcattgtaaaactgtaacataggtgtttttgttttttcttttctcccatgttaggtaagggggaaaaaggaacatttaccaagtaaataaatagtatataaatcattaggacaaaaatagcctcctatttaaatgaacatatttcagacatttggataccacggggatacttagtaatacttggccacatgccataattttaattttttcttaactatttctgagagacctccttccacttaaagtatatattagtaagatgttgccacatgtggaattgtaaggctgggaactgagggtaataattaaaattcatatgcatatctttgaaaactcatgttaattatacacagttttaattcttctattttaccagctgaatttgaatttcaaagggatgaaaacatacccagatgtgccccccagttggttgtctttgggtaccttctggtgctatgaccaggaactagtgaacagccccaaaactgaggggtaaaggtaccaaggaaaatcgaggggtctgaatgtggcagaccagactgtatagtgtttgaaggcagcagagatagagtagatagatggaagctaacagcctcactttccttcatgacaaaactattgggaaacagagtaagtaagtgcctttccttcttatagggcctttaaacctagcaccataacaaacctgagaccagaaaagcattttatttcagcccacgatgattgaagaagcaaaaaatatcccagtaatgtgatttcatatgcaatccaatgtttttccccagctcccaagtgaaagcccttaaaagtacaaatgaggtcagatcattcaatggcttattcatgcattcatttattcatttgcttattcattcattcactcattcattcaataaacataagcattttttaccttgaggaatgaagctacatcatggtacatccaggtcaaattggagaaactctgatgtcagtcagggtacattttcccttttagtctcattcagcactttgtctgggattgaatttcctgttcctagaagactagaccaagggaactgaccaactctatagcctaggagggaatttgaaattaaattatatgacagaaggggggaatttaggaccaaccagcaacagtttgagaaaagtaccaaccccaaccaaatagatataccatggacttaataatataataaaaagcattattttgtagaaactgcttctctctttgtagaactagttgcaatgagttatgatcttaaacctagtgatatgatcacactaaacagtatcacatttaggctgtgtgtgtttgtgtatgcgtgtgtgtgtgtgtgtgtacatgtacattccacttttgcctgtgtgactatgaacaagtcagtttctcatgataggactcagttttctgaattccaaagaggacagttgagctggattttgtttagggcatcttccaatgccagttccatttataaacaattattgtttttccattcccaagaaaatgcaagattgtgttttggggaagattctcaactgtgagatgacagcgtatgctatgttcctttcattgcaattggtgttttatagcatcctgcccagcctggcccgcatttggccccgtagccatgctgtcctcaggctaggatctggttagttgttccagactcaagttggtccctccttctgctctgtggagaaaaatcacaacctcaaagggataggtttttttttttatggttgctcctgaaagtggcatggtccctctagatgtcagcaaatattaaggcaattaaataaggcaaattaattatgggaaacattagcattgatttctgaagacagtcttcttcttgctgagtctagcctcaccccttcttgccttttaggaagagttccatgttcttagacaagcttgttttcggataaaatattagacttttttcttagaaaatccctttgttttaaaattggtaatttttaaaaatcccaatctctggctacatttgagtttgaggaaattctttttcacatctctaaatatgtttcaatttgatagtattagtaaataagtaaataaaaatgccttattccacaaatgtttattgagatccttctaatttccagtaccaggaatacacacatcaataggacatggttcttatacttcataaagtcatagaaagcaaaaagaactggcagttatctggttcagttatctgattctctgaaagagaagaaatataccagccagtatagtcaatattattttcaaaaatttggtgaatggccattgtaaggtgcatttacacacatataatcatactcctatcaactataaatatatgaattgcttataagcatgattgacatttgttattcttacatagattttgtgagtgactagcaaaagctgttctttgcttctagaaccatgctgtcccaatataactttttgcattgatggaaatgttctattttagcactgtccaataagttagcctttagcaaaacatagctattgagcacttgaaatatggctagctcgttatcctcagcaaactaacacagcaacagaaaaccaaacaccgcatgttctcacttataggtaggaactaaacaaagaaaacacatgggcacatgggggaacaacacacactggggcctgttgaggggaagaggggagggagagcatcaggaagaatacctaataaatgctgggcttaatacctaggtgatgggtggagcaaaccaccatggcacacatttgcctatgtagcaaacctgcacttcctgcacatgtaccccagaactttaaataaaagttggaaattaaaaaaaaaaaaagtattgggcatgaggtccaaaagagaattggtatcaactaagtaccgttaacatacaagatatgacaatgaagaattaatactgattagctgctagatacgaagatgcttacatataaacaagcacgtttttcaaaataaacatcttgaaactaaaaaaaaagaaatatggctagtttgaaaaagaaaataaatgtttaattttatttaatttaaggtaatttaaattttcagtagccacttttggccagtggctaccatgttggctagtgaagttctagatgctctgccggttatttggtaactgtaacttggtaaagtaagttaaaagaataaatgtgatggtgtgcaagagtaatataaaactagaaaatataatttaaaaatttagaatagctaggaactatgaaaagtaggaagaaataatttactaatcaactacaaagcattagcagaataaaattggcaggagagtgataaaatcacatgtaaattgcaaaatgaaggttaaaatgaagccaccaaagtggggtgacggtgttagaggtgtcaccatgctgtgaaaacagagtagacttcttaacacaaaacatagaaaagcatgctttctgcttaaatcagcctttccaaaaataaatagagctctttattaaaaattaactatatacaagaagtgaactctggttatcataataatatgcttcaaactattaaataatatggaggaagatttaaaatataaatatagaaatacctacatttgttatggtttttttgaaataatttttcactgtgtcagccactaattcatccaacctaataattcttcaagcccaagcaggacatgtctttgaactcatcttgaactctttctttaagtctaaaccctgtagggcttacataagatagagtctttgtttcaagtctcccaggtgacctaagcctttgctggcagcctctgcctcgccgtttcttcctccctgccctgctagtctattccaagtgtagtctgcagatcaacaacattacctgggagcttgtgagccatgcagaatctcaggccccgcccagacctattaaatcagatgctacaatttaacgagatcccctggcaattgttaagcacattaagtttgagaagctctgctctagtgtgtaaagtctacatgctctctagggcttactgaagagaaggaattacatagctttatttgcattaaggataccttttaaaatgttttcaacattttatttaaaaaattttcaaacatatggaaaactggaaagaattttacagtgaaatcactattctcaccacctagattctgtcattaatatttaactctactggcttcgtcatattgtcacccttttatccttctgtgcatccatcaatccatcttgatttcttttcattcatttcaaagtaaattgcagacaacagtacattttctcctaagtaaatatcctggtacatgtatcattaactagagttcaatatttatttgcaggatttttctcttctggaacaaaattgtacacaactaaatgtgcaaatcataagtatccattctcttgaaggttttttttttgtttattttgttttttgagatggagtctcgctctgtcacccaggttggagtgcagtggcgcgatcttggctcactgcaagctccgcctcctaggttcatgccattcttctgcctcagcctcccaagtaggtgggactacaggcgcccgccaccatgcccagctaattttttgtattttttagtagagacggggtttcagcgtgttagccaggatggtctcgatctcctgacctcgtgattcgcccacctcagcctcccaaagtgctgagtctcttaagttttaacaaatgtaatacacttgtatataaatttcctaccctttgttttcttgtgtctacctcatttgtatagtttacaaaacaaaataagaaggaaatggaaggacagggcacatagttgtccacagaatagtctgttcttttcccagcagccaggggctccctcccttgcacctcctatcctcagtccctcattctatcttatagccaagcattgctagaaaggccaatttaaatcaaatgagatggtttagttttattctacacttgtctcatgttctgatatggtgagcctgcttttaaaggcttgtattcaacttatattcacatttcaatgagaaaagtttttgagatatataaaaatagaaactttctaatagatatcagaaagttgaattatagtgtgattacctcactattacatttttcctcttttgccttttgccgtttctcccctttcttctttccctttatccagatagacccttgacctctagtccttaggccaagtgaagggaattgacaagaaccttatagtgaaagaatttatgttgcctggtgataagcattttggagaccgaatgatatggaaaagaactcttaagaactcaattatgactgttctgttgtgtatcctctcagggtggcatatggaaggcttacgactagttcatttctttattaaaattaaatttggaaaatatttagacagctctttcctggatctaggctaccctacacctttattgtgtcatatttggttaacctgcctagatagtgacccagtgatcatacatgagagcaggattttagatcaagtgttacttcgctgagaaatgtgtggtactcattataacagaaggcaagactgttctagaatctaggtgtgaagtatcagcagaggtggatttttaaagtaagttaaaagaataaatatgatagcctgcaagggtaatataatataaatagaactagaaaattaaatagaaaatataatttaaaaaattagaatagcaaggaactaagaaaaagaaaagtaggaagaaagaatttagtaatcaactacaaagcactggaagaataaaattggcaggagagtgataaaattgcatgtaaattgcaaaatgaaggttaaaagcaattaagatacacgggtactgaagagaataataaaaacataaaataagctaggatgagtagttaaaataaataacaccagctaagaagatacttacaaagattaaaaaacagatcaagtagtaataaaataaggaagtggtttaaggcagtaaattaaagaacaattaaaaaacaataaggagagaaaattaacaggccaaaatgacacttaataactgtattaatagctaacatttattgacttctttctatgtggtagacactttatgtacattaacttctttaattcaagtgtattaaaataattaggaatttatttttggggtaagcaaaaaaaagttcagagaagggaaagccaggcatcagggcaataaccctcccctcgctaaaaaaacaaaaacaaaaaaaaacaaaacctgaaggtaagcaaaatagatctgcagatatcaattttcattccttgtctaatgtggtgatttttgcggttgaaaaacacccagtacctgccctggtacttttcttcagatcacaggttcccgaagtggctagcgttataaaatgagcattctctttttctctcgtcatagataagattgacctttgttaggggcaaagacgttttcaatcagtagaatccatagcccagaacctatggcagtgggcaaacatctcataagcccactcatcttacgtgacctagctcaggcctatcttctggaagtacttcctagttccttcagactgtgcctatgtactacttagtacactggagttggagtggaatttcgtttctgacacttatctttcattcctctctagaccatagaattctgaagagaaggatcatagttttatatcctgttcctcaactcaggcctggtatacagtaggtgctcaatgaatgcttttcaaagtgagcctagttgaacctgttgtcagtgggttttgtgtgtatgtttttttaaccagcaaccggtctattctgactggattttctgcctgccttgaacccccacaaacatgtatttttgtgtttctattatccagagaatttcttccacaagaaaatggctttttgtacttttttttttttttctgtttaccacagactggtacccatcttttacctccaacttatttatattgcataccctataatttttatgccagaaatattttatgggtgtatatataccctggatatgggtatatatatgtatatgtgtgtgtgtgtgtgtgtgtgtgtgtgtgtgtgtgtgtgtattcagagctcagatatctgtgactgttttttctcttttccatacttttctttggggcagctgttatctctgtggccttgagcttgatccataattcattcattcactcattcactcatttgtttagtagatgttttcttgagacttattattactcagaatagtgttgggcattaaggcaaagaaaatgaaaaggagacctaatgcctgttcttgagcagctctctgtcttgatcttgttgtttagcctgtttccattggccctatttttctttctttttttttttttttgagacagagtctcactctgtcacccaggctggagtgcagtagcacagtcttggctcactgcaacctccacttcctgggttcaagcaattctcatgcctcagcctcccaagtagctgggattacaggcatgccccaccacgcctggctaatttttgtattttttagtagagacggagtttcaccatgttggacaggctggtctcaaactctggacctcaggtgatccacccacttcagtctcccaaagtggtgggattacaggcgtgagccactatacccggccagccctatttttcatggaaaggaaaaaacaactattaacactcttcacaggttattgttgtattttgaaaagagttatgaaatcccttgctaactttctcttctctggggaaaagagtctgagttccctcagcctttcttcctaagacctgtggttggctataaattgcattggttgctcttctctaatgacctctggagattggcaacaccaaacaaagacatgagttagatatggactcttcttcagacactttgtttaaattttaaatttttttctgattgcaaattagtatttaatgtagaaaatttggagaattcaggaaaaccacaaagaagaaaatttactgttaactttgtgctcgtagccttctagcactttatgtataagtgtgttttttatgtgggtgtaagaaagttacatttccttttacctacctatattactaaaaatgtgttatgaatattttccatatcattaaacattcttctcaagcataactttaaataactgcataggaaactgttatagggaaagtccacaatgtgtttaatcaatttatactatagaacatttaagctacttttgattttggttttttttttttttttttactattattaataacacggtggtaagctttatagtacagaacatttaatgcacattttctgttatttccttggataaatttctaaaaatggaattgctagatcaaagggtatgcataagtttacagtctttgtgatgtattgtaaacttttcttctaggaacttctattaatttatggttctcactaacagtttctggtagtttccatttcctcacaccctcaactgtttttcagtctttgtcaattatcaaatcattaaatggcatctcgtttttattttaacttgtatcccttgggttgctagtgcgattgaacattttttatatgtttattggccttttgtacatattctggaaatgttcatctcttttcttattgatttctaagaactcttataatacaataaggatattaatcctcctgcacttggccagcatttagtaaatagaggaaattctatttctgagtggaggaggactcctgtggaataaggccccaagtctcatcctatttctgtgtaaagttcttcagagtgaaagctggattgttgccctaggaaaactaaaggcagatctgtaagtgataccagtattgatcttaaaataaataaattaattaaccctacaatctgaactagcttgacattttctatttttctgatctatgaaaaatctcaggttgtaaaatagtgcccaagaattttctaaaagaacctagagatatgttagtggaaagtttagggggagatctgccctaggcctagtatgaccctaagccaaataaataaatccttggcttgtttatatagccaggttgaagagataatagttacatctattaaaaaagctttcttatgacctttgctacacttaggtcaagaaaatggtattttgagtgactagatgttttattttggatgctcgatcagtctccttgtttcttttactatctgtaagataacacattcttctcagttgttgaactttgacatctcaccatcatatgctctgcccatcttattccgtagcagcacacataaagaaaggccaaagcagactcctgaacccacagtacagctggaaggtttctactgcagagattctgggactctttaaaaagaaaaaaattaaaatttcaaaaaatcaaacccccttacacttggatgagaattccagaataaaagagggtgtcccccagcatcccctgaatatttctagggtggtgtcaagtgaattcaaaattcttgagcacatagattgttttcaagctcttgttttcatttcatcagtaaatagaattttaaaaacaacaatatcctcccatcagtaaatttggcacaatggatactagcactccgttctcgtacattcttgtcaacattttctttctgcatcccccacccccaagcctgggcctgcttcccactatatctcccacaacccttctgttagctgtaatgaccctgcaaacactaaatggcatttgagtgcattaagcagcaaactctctggtgacatagcaattatggctctgaaatagatttggtgcgtcacggaagataagggttttgaaagtttctattgtgattatagcctgtaactcccacaaataataggcttcaaaataagaggctgccaacggagcctttgtggctttgtctcagtgatggcacgtaaattgctattaatgtcctaagtgtacttgaatatgccagtctttgggatgtggagttggctcagtgtctctctttacacggcatgtcattgttggtctgataatctggggtaattgctgtctcttggatggtcagaaaagtgtaaggggtttagcttcctgtgtgatggtaaatagcctcaaaatttaccccacgagggcaggttcacacatactggctgtgtgtgtatttcatgtgtagccaccgttcaccgttaagatgtgtatacaatctctgtgtgtacccttagtaaataatagccttgtcaacaaagccaaagcaaaatcaaaggttataaaaatgaaatgacgaattcagggctgtataggttcagccaatcagataatttatattgagagtttaaaaaagaaaaagaatacccttacttgaattatctaggtttagctttatgaggaagctttatgcttcctcttttctagtgtagctactcttttctagtgtaagtagcatctgtgtgtctgtctatattctttaggtagtatgagtacattcgaaatgtatatcagctctacgtgaatataataaatgtggaaattatgcatgttgtcgaatgctgtttgttgatgtttagaagtgtgtttttattttggtttgtgcagctgtgcaggcagaggttatttattcagatataagtagaattctctgcactaaggcacctttgtttagctaaaatcaagctgagcttatttttctttgccaggagatcaggatagcctttggaaaaagtaagaaaatcaaacttgaagctttagcctcttgtatgtccatttagcctaaggaccttaagtctgtaagacatgaacacgttatgtgtaactgtcctatttgtacttttaacagaaatggaaaagcaactcaacccaaaacctggaaatgcacaccatctcctatactatgtgagttatggagaggctcagctaaaaccaccccgtgtctcagatcccttatatggcattattaatcctggatcttcgcaacagattcattagaaaagaataaagctaagaaggagccagagtagatcttgatctcagagttgatgtattatacaagcgcactttaataatgtggcattaggatgttggcaggagggcacactatgatggtgctacagttgatggaatcttccagttggtgactgagcaccccttagcagttagggtgcatgcaagataaaattcaaggtagtaacttctaacaagagagtttgttttcataccgtgtgaacatggatcagatataccatcttactcttaggtcttagaccagaactctgccttgccagtgtaagttaagccatattcactggcaaggtggtgccgcccatggtcaagcctcagaagcatagccctgcaggagcagagcttgtcttgttcaaaaccaagtttgatgaggtggattgttgcttagtagcaggagatattagaatcctcggacttttctgaggccagtcttgtgattcatatgttctagcatcttaataaacaacatagggattcccaaaggtgaactgaagagcacaagtcacctgcctttagctgtgagcatccaaagtagctgtgctctgcatgtggagcgcacacattgtcccacagccccgtcttttgaaaattgaaatgtccaaaaagcagtagcaggcagtgggtactaagtctggcaaatcctgggttctgagatctagttttctctcctgagaagtaggagtaagagttcacactagatttgtgtaccactgtgtatttgtgatccagagcaagagatggacctataactgtgcagttatgctgggcacctgcagccaagccatccagtattcacaggaacgagacaccaagggaaggcttcaaagccatcatttctccttccattcaatcaagtgcttaattgagcagctgctgtgtcaaacatgagcctagtcctgtaatggcttgttgttgaatgatttaccatctcattgaggataaatatcaaagtgcttcatgtagcctgcaagtctgggcatggctaagtcctctcctctccggtcctgtcttgcttcacttaccactgttctcccctgttccattctttctggccttctttgagtcccttggagactctggaaaggcttccctttgccccactcttggcttgtctgttttctgttcaccttcaggctgattttccgtaagcccaagtgaggtccctcttttgtactgtctcctagcacttattgccatctagaatctgtatacattattttgataatatagcaaatgtcaatttcctgcaaaacagtaaactccttgagagcagaaacaagatttttttaacttattttatcaaccactgtatgcccagtatgtagcacaagtgggcactgaatacgtatttacgtaattaaaaactaagtgattacagccaaaaacatatggtgctcacttggagattttaaatgataaataaaagttgcacgtagttttaaatgtcaaaatgaaggatcagtaagtcagtggtattagaggctagagacatgggtgatgtgtgccttgaagaaacctacaataagaaagtgactctcaagctgggccttgaaagatgacacggatttgtagagaccagaggagatagacaggcaaaggcaaaaaaatcctctcacttgacttctcagtacagtaaaggaaggattctcactttgacaatgaaaaattattatttctttgcagcagcgtaaactacaaaagtctttgcagcaaggatttctattctccaccaggaatggctgactgcattgcactgctaatctttctgaacatagagacctataaacaagatctcaggattcaagaggcttgatgggagccagactagagaggagtgtggtggtgtggcattgatatgaagccaccaggggctgacctagtggtaggtggcaattagagaggataccctggcagtcaaaggactatggaaacaggaatcctagagccagcagcatgagttaatccaagcagaggattggcttctgggaagtacgatggcaggtagtagttggtgagctgaggttccagagcagtattccaataacaagagcaagtcactttctcggtctttaaggaactgtaataaatagcagaaaattaagcaaagctaggcataagcttggtagagatggtctcaaccacaagaaagaagttcctatatgaagacactgatgcaaaatgtccaagtaagacaagtggcaaaattgattctgagttacctatggtaccaaactaggccagaagaaaatttcttctgtctgagagcacatgttattcccatatagggttgccagatttagcaaatggaaatactacatgggatatacttataaaattacagtgtaacagggcatcccatattttatctggcaatgtcattcctagatcctaagagggaagctgaatctgtatatgggtctcacaccagagagagaaaagataggggctcaaggacacaacaggccattaggagactatgtctgttttgcatttttgcaattcccactgtgctcagggtggtaactgggatacagatgcaggatgggttgtcttctccttgtgcctttctggagaacactccttgttaagatggtgtgctaagctgtggcactgcaactgtcaggttccagtgtccttctcaattgctttccctaaacgcaaaacaaaacagtataaatattaattatcattgcttgtttgggataagctatgaagcaccaaatctccctgatgccagtttagtaagagaaacgttcactgcctgaagattaaagttacccagaaacttggcagtgcttctgctctgtcttttgagtattttctaggtgtacacagctatttacatatagttggaatgaattatggaggtcagggatctcatgccatatgtctctccatgcccatgttgggggatggatgtcacagtgccaccaagtgtttctttacttcatcctatgcctctccaagaaacatttatcaaaatcggcgatgtgtcgggcactgtggtgggcactttggaataaaagataaattccacacccttgcttttatggtcgggtaggtgaaaccgacgtgtgaaggaacacacgcaatacagcagcacatgtgctgtgacagaggcacatacatagaactgggggcctgcaggaggaagaaacaaaaagcatggccaggggacagatggatgtgcaaagatattcaaattcagtcttacaaagcagccaaggtgtgagtgagatgtaattggaggagtgagggcacggcattcaaggggaaagaagcaggcatgagacggctgctctgtcctgggaaattcatgggaatgtaaataattgtgttgataggggaagtaagcaagatcaaggctgcggcagagctgctgaggacattgaacctcatcttgaggccaatgggtagccattgaagatttcaacagggagatgacatgcacagaatgacacttttgaaagatagctctggtggcagctagagataggactggaggaatacccagaccgggcctggatctcttttccactgtaaaattccccaggaaattttgaatcttttgacgtccctaagggggctttccaatagcatcttttcaaagtgctgtctgtgtaatcttgggaaagtgttaagcatatcaggaagacatatttcttctagcttgatagaagagtgatgaatctaggatgtgacctctgctgtgtgagctgatgtctccctgatatatagtggctctgtgtgtgtttgcatagagagggaaagaggatgcatccgtgtctctgtttttcttcccggccgttcccaacagtgactgggtgattgaggggctggagcacgtgcagctcctcacccacgctgaaggcatctctagtaatggcatctggcccatatgcagatctagctccactctgtgctgacatcagccggtttgtggcacctcagcgtatttctgggttgcaaatgagagtttcttagtgccaggcttgcttgggctgtcacatcaggtgatgaattctctgcatcaaccgtgtgctgctaaggtaatcgcagaggaagagtgggaaaaagaggagatggggcaggtgcttctcagccctgcagccgctgctcagggctaaaagcagcactggatccacaacagggagggagaagcaactatctgtggtccccgttctggttcaaggagggtggtagagaaaaggcagggttttggttgcaattctgtgtcacgtgtcctgtcaggagaaaccacgtgggttttcccatctgccattgccccatccttggctcaagagctagctccctctacctcctcagacaggcatgttttgcattaccttttaggtgaagttctagcaaaatttggtgtatatcaaattatatgccaaattctttaggatagaccatagagtaaatagtcatttttattcccgaaacactttgtttccaaatatctttgtgttttggaaatccagattttcttatcttgggaacctgctgtattttatcttagttttatattctatgagcttctctcttggtgagctccaggttgagctgctctgctggcttaggcttcatctggtagaattaaaagttacattgggtcacacgtcccaggtgttgcatcacaggccacagaattacctatataaaactgagtgcaaatgtagacactcttccactaaattgtttttagcaattaaaagtgtacctttggttttgcagattttacctcccaccctgtgacccctcagtgtggtttatgacattagcatttccaagagtgtgttcattataaagaattgtttgcatcagaaagtagagagggaagctgaggtgcagaaaaaaaataaaaataaaagtcttattttccaccccgcccccacccaccgcacagttgttaatgaaagcatcctctcctctcactctgcccagagataaataaacacacaaaggcggagtttcctacttaatattcacccacagtcgaggtagagggaaggaattgctccccagggttaacgtggcagtaagcgaggtcagctgtttcccaagacggtgcagcctctgaacgtcttccatcacagctagaatgatacagctgaagcagccgaagtgatttacaggaaacccagttaacttgagtttgcttgcagtttctatcttatgatggttttagcagtaacagcagcaaataatataccgtcctataaagcacctctagagaaaagaattcttccacattccccagcatgacatgcttcttctaaaaagtatttgtgtttctctaacttaaaccctataggctacaatgtcctaaatttggtgagaagtgggaggtcatagctggcatatcctggaatagggtggccaaaagtctcattttgctcaggctgttggggtctactcggatctgagactttaggtactaacatgggaaagtcctgggcaaactgggatggatggtcaccaaatctgagggggtgtgtgtgtgtgtatctgtgtgcatatttatggttggagggggagtggaaaaaaggggagtgaaagaggttttgtttaatgtatttcttttagctagaaggttttatatattcttcactaggccaactagaataatataatgctggttttgagattagcttgaaataattcctatttctcccatctgtgggttctctataccccctaacatcttacacactggtctgagaaaacagaactttttaaagaaaagagatcaaatttttactatttgagttatttcaggtctgggatgactcaagaagaagtctcccagaaccttctgggcaatatagaatgccttgtcaattccttcttaatgaaacaccacagaactaattttctttactaatggcttcattttttgcaccacttattgttatcttaatggaattatggcatggctaaaatgatagagtggtgatttgtgagcaatgtaatagaactccattgttccatgacctatgacatgtacgctcactgctttcatagagcttccttatctgcttattttataccagggtgattctaagatacatgccttttttctttctttctttctttctttttttttttttttttaccagaattttactctacttcatgacattgtacttaaaaacttaaaaaaaaagttttcttaaatttctgtactgctgagtcatttttattcctgaaacactttgtttccaaatatctttgtgctttggaaatccagattttcttatctcgggaacctgctgcattccccagtgtgacgtgcttcctctaaaaagtaggacccctacctcctgcccctacagatacactcctgcctgcctgcctgtctgtctacctacctatctatctacctgcctatctacctgtctgtctacttatctatctatctaaatatctatctggtaaacattcacatataaaaatgagtaggagaaacagataccaaagcaattatatgtgtcatcaaagctgaataattttccccaagtagtaggattatgggtgcatgctgtatgttttgttttttatgctttctaatttcccaaatattagcgataagtatatcttatttttattttaaaaaatgacattaaaggatcttctttgggaaaaataaacgtggccgccattcttagtcagcctaaaatggcaccagaatctatattcctggttgggatgggaggctacaatattatcacccctatggcagactttcattaggaatttgaatgaattctgttcttgattctggttatactacagagtctttgcccccaaaagttggaaaagctttctgttatgaaagaaagaattattttcctccttattgttctccgtctaatctgtttatcacaaacagcagggggaaatgtcctccaacagagaaaaggagtgagaggagtgacttgactgggttaggagatgggagattggaacttgagagcagttatttgctgacccaagattggggagcggtgttcttggcattgctcaggatgccctcttggtatccagatctgcttttcagtgaggtgtgaacaaaacctaccctgttgctgaagtaactggtaggagctgctttgaattaaaagcctggctttcctgggaaaattggagcatcatttgggtgagccaatgataaagaaagccaagtggttgaaaagcgcagagaaaatggagcccgaattcaaagatctcaaggcctgtgttctcagtcgtgaaccgggacacctgcttttctcttgcacctctgctctctgatgaataaaatgggaacggcatactccaggtgccatggagtatgcaagagttgaagtggtgctccctcccaagcagcaacaataatacctgccccatctcccccaaatttttcagagaatgagaggatagtacaatagaaaacattttaccagggatgtctcagacctgatctgttcaacgtgaactacaaaggaacacagtaatcgaaggggggaaaggcattttagcacacttatatttcaatgctttaaaacatataagcaatcatgaattatgcatcatgaattaaccactatagcaaagcattcttcaactattttagtgctgggatttttttgaaaggggtggttactaaacagatttttttagaacagttttaacagttttattgttgggatgctcctggatctagagtcttgtaaaatgatctccaaatattgatcaagcctataccttcccgtctcaccacctctctggatatattcacacagactagtccttatggccttggcaccattgttgtatctgttatagtcacctgaattagcctctgtacttttcaaaactcacctcaaagagtgctccctctatgaagtatttcctgatgttgcaacaaaatgtgatattgttttcatttgaaacttcatagcaatgggactctaccatttattaggttctgccttgatttataagttcattcgtgggcttatctccctccttgaacacatgaactacatctcactcatcattatatacccatgagcatctagtatagaaccttgtgcagaacaaatacctggaatcccataaatacatgggacatccagagtcagaaagaaccctagaaagcatttgagccaaccttcttatttttcaaaaaagaagactaaggtcaaataggtgaaggtgctttaccatcgacattagctagttgttgccagagccagaaccaaaacttgagtcccttgacctgcaggacagctgtcatttcactgctggctgggacttaattacagagtctttgggaagtataaacacatcatactagtgggaggtattaacatcatatccagaggctcactgggaggacccaaacttatttgagggtgggggcaatattatcacccacagtaatagttgcccatttgatgagtgtctccatgtgccaggcactatgctaggtcctttacacaagatgcctcattgtcattgtctgctgaaaacagccacccaatctcagaggactgacttctctccctttttcccttctaggctaatggaggttggcaggatgctactaccccttcatcagtgacctcccctacagaaggccctggcagtgttcactctgatacctccaactgatctcccagcaatcgcatcccggctgaccctgtgccccagttggggcaggggcaggagggagggtttctctcccaacgctgaagcggtcagactggaggtcgaagcaatcagcaaacacaataagagtctccttctcttctcttctttgggatgctatttcagccaatctggacacttctttatactctcttcccttttttttctgggtagaagccacccttccctgcctccagctgtcagcctggttttcgtcatcttccctgcccctgtgcctctgtcctagactcccggggtccccgccctctctcatatcactgaaggatattttcaacaattagaggaatttaaagaggaaaaaaattacaaagaaaataataaaagtgtttgtacgttttcatgctggtggtttgaggagccaaatttacctcactcgaatccctcactccctatgttaacaggcaatccttctctgtttctcttattactctcactacctcttagcaggaatactccacattgccctattcattccaggcctccctgcttcctcttgctcttcctccctggggacagtactgattggaacactttcctcctcttccttcctagccccagctattcactggggactgtcatagctgggattctaaaggtgccacatttttcagtttcatctccactaggttggttcccgggcaggaagtcaggcagcagggaaggacacgggaacagcaggtggagaattcctacagtctttcttaccctgctagcaatagctctcagtttcagaggcacagtctttggagaccattcagcactgagaaagcaatatttagaacctattgcaaaactgggcctgagttaggcatggtgatgaatgcatcagcaaggaatagaaagttcttatcgtgaaacccttcaacctcaactatgccttcatagacacacacgttcatgcacatgtaggcacatgtaccatctcacatcttcactttcccgagatgccatatacaattacctacattaataactgtagcactatgccttttgagcccgagagagggaattagtgactctaagtgaaggtcactgacacagagaagcagtatgtgtctggggcttccaggacctgcaggcccactagcgtgcacttaccagaatggcatacacaggacctgatcatgaggaagaccaggtttccagtgtaaactactcttgttcccaccacctctggagcactcagggagccccatacagtacttacaatgtctttaatggacttgattctgtttaattttttgttttatattaggcacactgtattaattttccaaaatgttataccacactatgttcttggtcctgacctattgctctggaggaaagagttgtataagaacgtggctcatgtgaacttttgctagcttcatttgaggacctgagaatcatggggaaagggaaggtaatgttttcattgaaatcatcacagtgatttttattccctgggaacacagcgtgtactaaaaatacatgagaaaatagcatgtatatgaaagctattctcaaaagtcacctgagctcaccatcttcatagccaaccctaccagttataaagatggcagctctatcacttgattaagtgggaggtggtcaaatattttggtgcctcattttcttcatctgtgagatgggaactgttatgcctggcttactaagagtcttgtgagagactgagaagttgattttgttcatatccaatctgtaaatgcgaagtcaggggaagtaatgtccctgaaataaacgggttcatgccatctagggacaataaatggttttcttgttgtaacttctggttaatatcagtaccttgatgtcatcaccgtgatgacaaagagaagagttattgttgatcttcttggttttggtctgtctcttttcttaggataaagaaaaacttccaaactagaaaaacaggccctggttcccttagtttgcacttgaacccaatatgttgccttgtacatacttggtccctgtcacattgactgcttgggaggcttccagggagaagtatgagaccctgaggggtgagaatgggcagctagcaagaacatggaaattctgcttggcactacagtcataaatagaaaacactgtgtgtgctcaggggagcaggggatgccactgaagaaactcaagggaatgtgtatttgaaggaaatgcaaaaactaagtatttagcaaaatgaaattatgccttgatgactaaaaggcactagaaaggttgtgtctactaacttcagccctaatcagaacagatgcctagaaggagcatttttgtgacaacttcatagtgattagaatcagtggagaactccatcttagtggcaggaatataatgaaactacccacgcaagaacatggttgaatcacatttgcttgacttagggcaaagtacgaaagagagacaaaagggttctcttggaaacaagaagagtgactccagatgtggcctgaataattgccatgttaagttaatgcaaaagatcagaacagggctacatttgcacaggcagtttctctccgggccgtagttttcactgatgatcacctttcacagcattttccccaaccagcatttcacttagtcttctctatacccagcacctcccccggcacccccggcaagcccactatcacttccgacttccaacgtggcatccgtgagatctgtccacattaggcgaagcaggagaacactgagagcagcaggatgggtttggaaagagcatgcctctggaaacacagcttcctgggaattcacatgaggccagtcctacagagagcaagatgcaccccaggatttcttcattttctaatagatgtgggagtgctccattttccccgacagcgaatttcccctgagaaacgatactagaccctgggtttgcccaccttgtaactcttccttatctcctccttttcatccctaatccatcctccctctggcatggaattgacgcccgtgcagtacatttgccaagtggcaccttctttcaatttatgttttattttgctatggtggtgattctttatttgctggttgtcttttctcacacatctttctctctgtctctctctttcctgctctttgtttttctgcccagaaaaacctgacttcgataccaaaaaagatgaaactacagaaactcaaatttaaaaaaaactttaaaagaaacaaaaaaatactcaacgattctttcagctttattaacattttccattgtttcttgcgacttgtgtctcgttctttgtagtattgatgatgaacatttgataatgaatgttcttgtatattcagataaagaaaaaaaaaaccaaaaaagcggtctgaatttaatagtgtttataataaaaattttaaaaatgaccctcatagcacgcaaaacaggatggggaatttcccctcttctttctgtgacaatgcgcatcattcctgcattagtttttaacaccagactacctacattcatcatttccctcatttttcttttattttcttgcatttgtgaattagttcaagaatgctagaaaagtgtcgagttgtgcacatccatttcttgtttcacaatgtttaaaagtgacagtaattcattttgtaaactaaaaaaaaaaaaaaaaaggttggaatagtgagcataataggtacaacctaacacattattatgtttattaactttgagacccagaaataaattcttttcttttcttgattcttgctcttaaaaatacaaaaaaaaaaatgttttgttttgtgttatttttggtttgtttattggggggctttttttaattgtcaggattatgatcttgctgtttttcttcaatatgtatacaaggtgatgtgaaaagatgacttgggcagaggagtaagaacaagtaggcttgttcttctactttgcttcagaattcagttaatgccaaaagcgaagatcaagcccatgttgatgtctcgttgctcacctgcatttccagagagtgtgacactcatgcagtccctgagaaaaataaaatcagggacatacttctccttttagccttttaaaaattcaaaaacgtttagtccaagggaactttttatgctatcaggaaaggtttttgctgtttttgattctgattatcacagccaagtactttgttttatttctccctaattaataactacattccatgaggcctcttccaaccaaagaggccttttcttccaggagagtcccgcaggagatgctggtatgatgggcaccattggttaagtaaactacatgcaggaagaagtccttggggccagtctgccagctgagtcctggttttggatgaagagttaatgagatattgggccaggctcaatgctgtagttttaatgctaagaggttacgtttacttcacagagtacacctcttagtaacctctgacttaggcagctgcttaaagcaaattgcaaaactggcttgatttggaatgtttttattagaggaaaaaagaaagccatattatctggaaaaaaattcattttaaataccatcattcaacaaattatgttcagaaagtggtcagaacttaagcaagaaaagtaaagaaagaatgcagaattgtggagcaatgctttaggaaatatttctacctgaacacttgtactcttgaagtcacaacaaaataatgatgagcttttcacatcacctttatggtttcaatccctagctcaaagcttcctggaatcttttattttttgtaaacttttttttcttttgttaaaataaataaaacattcaatgtttttctccttttctctcttattacttctttcctttggcattttcaatttgaaatgctttcctttggttgttggttttattctccccctacccctccccttttcttattattcagaatataaacctgcaaagctctgctctgttttggttttgaaagtttaagcttttctgcttctgtgagagcacaggcttctgtcccttttgattccaactgaacttttgtgttctctaatgatactaacacggtgtaggttttacagtctcctaatttgtactggtaatgcatattccaaataaatagtttcttttgttgcaaaaaaaaatacttgtattttgtgcacatttcttttcttacatgctggcaacttctctttccccaaactaggcctgcattagtgtagattatggtttaaactgttgccctaatcactgaaaagtctacatactatggtggtggggcagagaccttatggaccaccttcttcactcaggaaataagaaggaaggaaggaaggatcatttgtgggtaaacaatagctgtattacagagggacagagcaccccatcttgtctgcttgctactggcagccatccaccaagcaccagttcagagaaatgccaggagtattttccataataaattctaagttcctaagtcatggctgtttgcccagtgattctccttttcttctctttgtctgctgtgatctggtcataagaaaaattgtggttcccaagagatatttcaggggaaggaatctaggttacaaataatacccagttgtaggctctcaggagtgtgatagatgttactcccaacagatgtgcatctctaccatctgttatgcctaccatcccaaaggagcatctcttccaatagtctgcactcatattgaacccctgacctttgaggtttcgaagtgttacagagtgtggtatccccagtgttctagctggaacaccaggcctccacacctaagtctgtgcccaagtctttaacaccatcttcccatccatagagtgggatggaactccttgtctgccttttgacatgttactctagggccatcacatgcattacattctcattttcatgctgtagctctcctatgaggctctgtccagatcctctatgagatgagtatgtattgaaagttgaggtaataatcacttatcccaatcacaattctaaatgatagaaactagatcaaagcatccccagcctatgggaatcaaattatcatttttattaatggacaagctaagtgcccattggcctccaaagtttacagctatctgctaatgttgagttggtgagtgtcaccagaagccaaaatggaggactcgtgttctctcttcaaatctaaacattggaatatacttacgggagcaagcaggctccgattacttcctttttcaattgcatggaaaattaggggctaactcacccacctagtgtattacttagagtggtactaaatagatgtaagaaacagaccaaaaatgtatactgcctcaaatgcaatacaagctatttctcacttacggtatagcctaaggcaaatgtccctggtcattgcctctccttgaagtaatttggggatctagctgcttctactctgtggctcatccatcctccaagaatctgtagcttttcacatctagcccacagaagggaaagggtgtgaagaaggcccacccgcttcttgaaagccttgaccaagacttccattcatattcctaaatgcaagggttaggggtaggcgtggggattagaaaagtagtccctggctaggcagccacttcctgggaacaattgcacacagtaactctgtggacagctgactctgtccatcacacctagtgatgggataaggaagagcaaaagacaagcccatctatagctgtttcattgactggacacactttcagtagagacatttccatgtcagcattccacacttggcttgattactcttcacaaagaagatcaagagagggatttaacaggggccagagatgtccaatccaatattgcccacttaaagtagaggaaacagaagtctccacctctatagaaatgtaagaatgtgagagaaacgaccccttttttccgacgttctccaaatgttgttttctagcgtgccttagcaccgagcctgtggtcattaggaagggagagctgcagtacgttagggccaccttgttgccatcttcgggtcacactgacatgtttactgctagctggaagaatcaagtctggcagccagcagtcatcttaaagagtatggtaaagtgtaggtctaaccccttaaaatcacaaaatctcatacgctcaccccttctcccaaaccatagatttgtacatggctatccttatagattagacttccaccaaatccccattttatttatttatttttatttattttatttttttttttgagacggtatctcgtgtgatctctgctcactgcaacctccacctcctgggttcaagcaattctcctgcctcagcctcccaagtagtttggattacaggcatgcaccaccatgcccaaataatttttgtaattatagtagagacgaggtctcaccatgttggccaggctggtctcgaactcctggcctcaagtgatcctcctgccttggtctcccaaagaactgggattacaggcatgagccaccgcacctggccaaatccccatttcaaaaacagacatgactggtccaagtgcagtcgtgtttgcaactaattgattacaaccagttacagattcctttgttccttctccactcccactgcttactttgataagccttttaaattaaaaaaaatttttttttaaaacatgcaacaaaatgtcaattttactgaccaccatttcgtatgcagaatatagccttccttctggaaacatccattgtggagaaaggcacaagaacctagtcttatcaaatcattcagtgggtaagttcaagaaggttgttttaatctggatccttgaatcaggaatgatgttctgctttggggagttccctctcattcctgcataaaagctactatagtgtacaaagaagtaagtggttttgctgaccaccgaggccagtgtgattcaacctatggcttccagccttaggcagacttctgaggtcaccttgggcatggtagaggtgaggtaaggaaggttgtaaagggttatagcagtggcattgcccaggaccacattctttggagaatcattgtccttgtatatcctcccaggacccatgcaaaagacaatgcagctcttatttctggatgcttctagatagatcaaaacggtgcattcattaatatccaggttctcctgtaccctcagccaaaattcactctctcccacaatgcccagtcacatgacatagctcaccagagttatcctcctctctctctctctctttttttttttttttttttttgagacggggtcttgctgtttcaccaggctggagtgaggtggcacgaacatggctcactgcagtctcgacctccctgagctcaaatgatcctcccacctcagctacccaagtagctgggacttcaggcatgcaccatacccggctaatgtttgtattttctgtagagatgaggtcttgccatgttgctcaagctggtctcgaactcctgggttcaagcaatctgcctacattggcctcccaaagtgctaggattataggcgtgagccaccacgcctaggttcctctcttttaaattaaaattcaaaggaatattagtctacacctccacagtctccaatttcctcctgctgtgttcattcccagccagtacaccctcactccattgccagaagtaaagtcgaaggcctgccttctatagcagcagctggcctcttatattgaaatgaggaaaatcattctgccccctccaaagttaaattaatccaaccttgaatctttctagtatcccattttttttctagaaagtcacttggtaggcatttgaaccatatcccagtgttggcctgacccacagaatttagaaaacacagcaaagctcagactcctacagcacaattacatttccagaacccagagcatggaacatgaccagtggtaacaaatgaccatagaagagatttgaaaacttggtgaggaagcaggaaagacagagagcacgtgagaaagcaaaaatacaatttttatttcagtctttacaatgccagttgagtactatcaaatagaatgttgaaaaacagccaccaacaagaggttaattttgcactctgcttcctatatcctgagggaaacaatccgatctatgcattctgcctcctttctctgagaatgacctttgaaatattcatgtctttgtgaaaaattcaaaaatgtaaaatgggtcctctccagtccacaggctcacttgaggctcccgcctcccccttggtattcatatacatatttgagatttatcttgatttccatttccctttaaaccctgcattcctaatcctagatatgtttatccctgtaccactgtgacctctgctgcttccttctctggaattcctccagcccatgaccttctctgggcttttcctttgtctcaattggagtcaagctcaaatcctgaagcaggccattgttggtgcagagggcagggcttcttccctgggcaccactccccacaaagcctcccttccttctgccttggagttccaggccttgaataactggtgctgcttcagtattagcagaaacattcctttctgccctccccttgagatttgcacctgatgtttctctcctattgttcctcaaatccttttcagcagagcctgcaaggtttaaaatgttctaacctgctcctttccctggttccatcccttctctgtcttgcatagggctcactctctgctgttgggcacagacatttgttttcctaacatacttctctaaattatatttttaattttttttcaatatctctggatctgtccaaagcttccactgttcagctttaattccttgagttgagtaatgcttcataggcggagtcttcccaggagcacacacccaggctcagccattacatggctgtagtgtgtttccgccctcccaggagccctcccttagagcccatttcctatgctacaccttcagaacacatgacaggtctgtttctctatacatataactgctatgttggaattcactaataatccttcaagtattttcctctgatcttcttgattttcccctctcaaatgtgtccaccttttctgttcgcacctagtgaagtcttctgaatcaccagtgagaacatttccaattgctgccataactggtcccctatctgctgctttgggtgctttctggatcctttggtattgaggaacacattggttgctcactagatcctaaaagcaagaccacacatacttgaatcccagctctgctactgccaggttcttcctgatgccacttctgacaacagatgagaagttttcttccaattccccaaaaccaactaggtgtcctacaatccaactcaattctgacaccaactacccggaattagcttcagactcctaaggtttaagggctcagtcccacaagcctgccctcacatcagacaccagcaacaagtattgtgtcacctgtacttctggtgactggctaaaaattgggaggtctcatgactccctcctcaaattcaataatttgctggaatagctcacaggagtcaggaagccactttgcttccatttagcagtttattataaaggatacaaataaacagccaaacagagaggcacatagtgggaggtctggaagggtcctaagcacaggagcctctaaccccatggagttggggtgtgccaccctcctggcatgtggatgtgttcactaactcagaagctccctgaaacccattgtttagggatctcatgtagatttcattaaatacatatgattgactaaatcattgtccataggcattggtgacgcaggctatagcctcttacccaggaattgtggggtggggctgaaagttctaaccttttaatcaagtcttgttctttctggtgaccagcttcatacttaagctgtctagtggcctgccaagagtcacctcattagaacaaaagactctcctatcacccttatcactgaggaaattccaacagtttcagttgttctgtaccaggaactggggacaaagaccaaatttcccattttaccataactaattaccagccatgtgacctttgatatgttgcttaatctttctgtgcctcagtttcctcatcaataaaatgaagacaattctagtatctacttcatagaattacagggaggattaagtgagttaatatatgtaaagcacttagaacaatgcctgacacacagtaaatgctaaacatgtgttagttattagtgtgatttctctaacatatctctctgggtgcatcttcaagcctgaactaagaataattaaaatattgtcctgtttcctagctccattataaactgttagctatgggtatattttctttcttttatatcaagctagcctggctgctaagatcttactcttcctgaaaaagttcttgtcatctcccagctcaatcagtgtgcttgccatcatttcttattcacttttccactgctcctattttgtttacaaaaattacaaacttaaaaaaaaaagatactgattccatttctcctagaaaatctgagcgaacctgattcctagggacaaagagtccaagtatgtgccttgtaaatgtcttttttagcctcaggtttgtaaaaatgtcactaaaatatttctgcacctcagctcaagagtagatgaacacctccaataaacaagggcctcattcctttgtgtcagttcactgataaaatgctctgtcaccacccccagagccagcacacacacacacacacacacacacacacacgctgtggctgacagcaaatctgagtttctgaaaccacaactctcataagagccatcttgcaatcctgtggtaggggtctcaagcctcactaatgtttcctttatggatcttgtatttcaattaaacaaagaggaagggagaatttggggtgactgtgcagtgtggcccacctatgcctagtacaatctaaaggcccaaatgaataaatgaatgaagaattgcaaagcaaacactggaagggatattcaggcctgctagacatcccagaatctcatcttaagaaaatttagaattcttcaaacaaatcacaaacttggtgcttagaagggaagtaggcaaagttggtcttggacaaaactacgctgttattgaagtttgtcttcatacgtgccgtgtactttctttgaatccttgttctctcctagtgctttttttctaggcttcaaatgaccaaggtgctggagattttactttagggagaaaggatgtataaaatacttgaatgtgtaaaatcttctaatgctagtctttggcttatttgcaagtctgccagactgacctaacctcagttgaaggctaggggtttccagcttcttaccaaccaatacaaggagcaatggctgaatggaaatcaagaaaacatttttattgatgacagaagggatacccggttgttccccaaatgcagagctctggtaaactttcttagagaatggaacaatctcccatctcttacctcaaatctaagaaaaagggccttctgtccaggctggcctggatcattctccaggtacatctatggggatagaacagtggcccctggagagccctgaattcctgcatagccatatggactgggagctcaagcagggccctctgcatttggtttcagagaacaagagactgtgactgcatcaatcatattaaccatttatcctctgcacccaagtttattccagtcaaatcactgcatcttgacctttaatgacataaaaccagctctttcacttgtaggtctgcagtcctagctctctgcacatcactgctttattcagattgtctagactccctctttgggactttctatgcattgccaataccccctctatgcaaatagcaaaatctctgctgaaaagtttgtgagtcctcttggcccctcttgctgggggttgttacttaggaaatcatgaacattgacaagctatctgtaaatcagccttgcatttcttcaacaagcaagcatgtactggccacctcctatgtgccaggcactgctctgtaccccaggcgaatcttctgctagcactgccactggaaatactggctcaatatgatgcaagattaaacaaaacacaacccaaatctctgggtccttggtcaggaatacaactgtatttatcaatgtacaagcttggacaagaatttaaaattatgatgtccattaacaaagccaggaagaaatagaattagactgggcttatgggaacagatgtagattaaaattttaaaagttcttacaattggatgacttggagtagctaatcctatcatgggatggaactataggaagcccaagaaagctgctcaagaaatgttatgacccaattacttcaaatcatctagcttcaaggagaggtggaaggatgctaggcaggaatccctcacacccagaagcagtggtgatgttgatttaaaaccttctcaagtctggattatagctactccaccttcccccaagtcatgcaggtgtataattccaaacaattcaatcaatacttattgacagctgaatgctgggaatacactagtgcatgatcacttagatgagttagcaattgctttctttaaagaatgtatgtagatttaggttgctctgtggaggaaaagaaatactgttaaaatgatagataatgaacattctgaattctgagggggctttattaatcttttctcctttttactaggttcaagtaaaaattgctgactccagccagactggtcttcttatagcacccctagaaattccaagcttatttctttctttttgcctttttacctttgctcatgatgccatgatgtcagccacctagaatgatggcccctaacacactcagacccacttacgtactccttcttcaagcaggtgtccatgtcttctatgcagaagacatgcatagaatatgcatagacattctatttctccttcctgaagttatccacctctccactgagctcctctagtgtgtctttggtcctgccttgaattacctttcaatgtcttggctccccacataaattactagaattcaaggatccgatctccctcacatacagaacaaagcacctcgtgacacacttagtacttgctcagacaagagagggaggaaggaacgaaggcaaaaaagaagagggagaaagggaataaaacagtgaaggagagcgcagatggggaaaagacaggaaaatacagagagaaggggtgggaggtttgggatagaggagtagcatggtgtaggaggaggtggaaagggcaaaagaggagagaaaaattgaaggaacaaaaaagaggaaagggaatacagagaagggaggaaaagattttaaaggagaaatgttaagagaggaaggaaaagagggagagattgaagccattcaagtaaggcgtataaggcatgagagatatgtcgcctcctttctccctaaagggagatctcaggatctcggtagttagaagtcaaaaaaggggcactgatagagaacgaggcctcaaagtgattacacagcaggtatgaagacaaacttccatggcgtgcccttgtcgttttgtttaagagcagctctgcttaactcacttctaaatatcaagtttgtgatttatttaaagaatcctaattgttcttgagatgatgacctggattgtctaacaaacctgaatattcctgccagtgtttggcttgaacatatagttattttaaactatccatttatttattccttcacttagcaaatattgaacaaatacctccccaccgctccaccgtgtgccaggcactagactaggtaataaggaaaaaactttgaccaaattgtctgttgtcagggatcttaggttccagcagaagaggaaaccaacaataaacacaataaataagtgtaccaaatggtgtgttagaagtgacaagtgctaagggaaagaggtaagaaaggagggtagaagttctggagtaaatcaaggtagggtggtccagaggattgactaaaaaggtgattttgagcaagctgtggaaggaataaggaaataaaccattaggttatctgagaagagtattccaggcagagaacagctcatgcaaaggccctggggcaggaacatatgtggtaggtttgaggaattgcaaggagcccaaggtggctggatcagagaaagtgaggggaagactgtcagatgatgcagtcagaaatttaatggtgaaagggaggggcagattacatagggcctcttgtaaggtctagtaacaactttagctattcttttgagtgaacctggaggccttggaatgtttgggatagaggagtagcattatatgacttaagttttaacgtgtgactctggcagcagtgctgtgaatagaccacagggaagcaggtttggaaataggaagaccagtgaggaggcaattgcaatatttggggcagaagttgatagtgtgaggacccagagaaaatcctggaataaggaaagttcatttgccttcactagaccttcctttgcacacacgatttctcctgcctggaatgactgtcttcatgctagaacaccttcccgggtttcaaagctcagtgccaatgccactcattcctgagttcccaccaaggattattgcttccacagcaccctatttatccctctcttgtagcactcatcctattgcgttgcaattactcatttacctttctggctctcttccgaaccaagaacacttttatgtcagcttagttcaaacattgatactaagtgggaataaaaaggtgaataagatgttatcccaattaccatctcatataggagaagacggaacaactgcccccacatttggttcatagttttcagattaatacgtgaacagagatttaccagaagccaaaccaccatgggctggagatatggtggttttggcttatttgcaacactgtttaatgtgtcatagtatagggcttcatctgctgcccccacagctccccttggctacttccccagcactcggtccagccaacaccattgccaatagatgctacagtgttgagagctaaggatcttgtcaaagtgagagagggagaccctgtggaagattccaggaagcagggagtgcaagatgattaaaggtagttgtggatgtatttatttttttctgtagtggtggttgttgatgcaaagctgtctctctggagtctctagtgacatttgttacttgactttccagttcttaaacagaaattctgtccttttcattgaattgctcctcttttgctaatgctctgtcttccccaagtcccaggcagagcatttgacatttgttattggtacaagagcatcatttgctgagtgtggtaaaaaaaaagtttcccaaaggggggaaatgaatgattatctcagatctcctcacccttctcttccttcagacacaacagcaatccccagccatgctgggccctggcagggagctgccctaatcggttttacattgtagctgcatggagatctgttgtgataattgtagatgcgttagcagagggcaaggggtgacagattgtggattcacaggacgtgctgaggtgggggctcagtgatgtttatttcttaaagtccctagctagggaaaggtattgttcctctaatcaacacatgtttcccgagagcctactgtgaaccaggcattgttctgagtgccagggatgacaagcaaaaataaaaacatccagttcctactctcagggtgtttactgtctagtgggggtatctaatatcaatccaatattcactcaggtaagtgtaaatctgcaactctgatatgtaatatgaaaaaagatatgtgatcctatgagagcctatagtaaagagaattgaatttgtcaacggggtcaacaatgtcttcttgagaagttgcctctcaggctataaactgacaaattagttaaatatggacagaaagagagtcctaggcagaaggcagagtagatacaaaggttgtgctggaggagggaatctggcggataccagtacctgaatacagatcagagagagcaaggaatggtccccaaggaagatgaggaagacagggaggtcgagaagggaggaccacatgaggtggcatgttttcactcatttttcatgccccagagcacctgcacagagtagttctcagtaaggagcacaagctctgatagaatagtggtttcattcattcatcttcccagcaattacttactgagtagcatctttgtgtttaaaagcagggataataagaggaatagtccccatgttcttccctcgtgagctcagtctggtaagctgtgaaatagaaaaatgaccctaagtgatattatcaagttatgtttaattgccacgggcagggtgactcaagtgtggtgagttgtggaggggccaggggaaacttggaaggggagggaagatgtgggtcactgttgctggcaggagtaagtttagaatccatactttctccattattaaccccaggacctgttagtttcccatacctccctcctctcccaggccctagcccttcagcctccagtgccattcagtgtaaatctttcttggagagttgtttctccttgtggtcatacagtaacaggctactaaacttgcctgtggggtgaattacgagctggtccctggagccccagcctctgttgcccacggaatgaactgtggcgctccaggctgctgggctttttatttatttatttgtttgctttagcatattttaatctgatcattaaattgcaatctgccacccatccccaaccccaactgtcttcagatggaacagatttttcataggtaatgatacctataaacttcagggatggcagccaccagagcaaactgggggagggaagggtgaggggttgcaaaaacatcttccacctggctggaccttggctgtcctgctattgccgtgggtcagcctggcctatcccagggcagctagaatggccaagttccccttggcagtaccagtgaccttttcctgcctaagaaatgtatgctcagaaggcagaagtgagcctctgcaccttgtccctgcatgcaaaagatcatccctgttccacattgtgccaggcagtaaaggtgtcacacaacctgcctttatggtgttgcatggggagagatctgcactgataaatcaaaggcaaagaggttgccagatggtgccatggagctcatgttcccgaggtcatccgtctgatctagtgctgccctgcactggggggattgccatctgatggcagggtcacgaccccacagacagtgacagtcaccatggttataatattggcaccaccaatttgtctagcattttataaggtgtactgacacattcctctggagcttcagaacaatcctgtgattgcaaaagggcaggtgtcatgattcccattctgcaggtgatgaaactgagatgaggggactaaggagtaaattgctcaaggaagtacctggctcatagccagttctcattaaatgtgtgttgaatgaatggatccgtttatgctgccctaaagcattctcaaaggaacatctcaaggtttgcttctagaatcacattcagagaaaagttaggattgagatcctgagagcctgcagcttccacccgaaccagctggataagaaatcaccaccaatttctttttaattaatttgtctgcatgccagagtgcttgacactggaaaaggtgttttgaaggtatgggtgcatagtaggcaggaaaagttacgtcttcatgttatcatgcttaccatggaccaggcacagttctacgatttttgcacatactcagttctctcaacagctctaagtaggtgctattattatattcattacaaacgaagaaactgaagcacagtgaggctgatccactttccaaaaggtacaaagatacaaagcagaggagccgagaatctggcttcagagttggagctgttgactgctttgccataccacctcatacttaatttttttccagaatatgcacattcctgctctacatatctattgtcctaaacattgcactgccagcatccaggtacaggtgaaatgacagaaagaattcttgcctcagtgtggaaatggaggctcaggaaatgatggggaaaggggtaatagcagacatctttgctgcattaaagtaaaatttctcagacatttcaaagaaataaactgtcaatgccatgacaagtccctgcactttctgtagcctcaggaagtggactcaaggcacacagttacctcaattctttcaggagaaaggggcatgcaatctggagataaatatcagtactctaagcttccagttcgtacaccagccaccagatcatggcgcttaaaaacttgtactattgttttaaatctatgttttaaaaccaataaagccaaaaatatattcttattcattattctgtaacttatgtggcatcaatgatcaaattgcctctcaatgaaggagtaggatttacataaacttgggtgaagcagatgacacagtaatctactcacacactggatatcttcacgcttgtagctcttcatctgccagtgggcaacctgcagaagaggctgtggtcccagctcagcctattgcctagaatttctccatgttacccagccatggagtcacaggaagcacaggaaatgtcaccagataccagaatacttggtgacaacataggacagcaacagacaaactgtgacccaaagccactgtgccaagaagccatccttgaatgacattctctattgataatcttacctggtttatgagctgttcacagagatatcatgctgatcctgactttacaattatagagaccttcctattctaaccagaagtgtaggcactatcccttatctggctccagtcagagtaactgtaaccatgacttagatgctaattcacaactggtggctgatggatgagttgttgattattttattatctgtgtacttcaatgttcccaaattaagccagataactatactttgaagaatcatcccatggctaaacctttaagaaataaatctaattttaaaataaattatatggcatctgagattcagaagggaccttgaaagtcccctggcccatttctcctctttctaagctggacacaaccctatgccacccaatctgtgggacctgactcctgatacagtggctgttgatggttttcagcaagagaaactctttcattgaaaacatggatttctaagaaaccctctatagagactggattaaagagaaggaggacagcatcagaaaaagagtccacagtggagattagaaaatttattagacaatgtgacacagagaaagggcacaagcttggtacccagacagctctaggttttacatcttcgatctgctgcttaggaactgggaggtcttgagcaagttattcaaacctctctgagacttctgaggcttcttcttcatcagtagagcgggaatctctgggttgccaagattcatgagatactatattcaaaagacacagcacatgcccgacacacggcagttgttccatccatctcatttccctttgtgctttcccagcatcctacatttggcttcacagtcaggacaggctataaaattgggctacgcagactacagctcagagaccatgcagaaaaaagaaagccctgctggggacaaagtgcctcaaggtattgaggagaaagccaccatttgtgatttgaaaattcatgcacaggtgcccaaggcaaatggccccagagccagagtgggcctatccagtctgtaaagttgagcattccatctcaaatggtggcctaaaaactggccatctctgtcttgatacacctttcccattagcttggagggttcacgaaacatttgcagaaagaattataaataaaccccagaatcagccagatacccaggaagaaagggaagcgcgggaggagtcagatgaggtttcagtcaccgcttaccaactgcttcatatcccccatggatttcttgtcaatgattattcaatctcaggcctgacctttctattctaaataacactgcaatatcagcgcggcccagcccgcagcttttgcaggaaattaactgtatctggctctcacaggagacccaagaaatcccttcagtaacagcccagactggtttacagaaaaaaagacccagcattatcttcttttcatacactcctcctaatacccgtctaaatatcacagagctcccagctgtttaattctaataaatactcatctattctcaaaacagacaaatgttaggtctcaggtgggcccccagcatttcatgtgggaggaagaagagaatacggagaaagagagaaaatagagcggctcactgctagctttaaatttccatccgtgcacaataccaggctaagaaaatggctaatggtttccagttgagccacagccagaggtgacttctgaggggggccattttttttaaacagtgtccgccccgagatattctctcttccctctgtgcagctccacgcagtgggcaggaatttgaggacccctgaccatgctgtacatctaggcagctagtgagcccagaggagcagggatagttgacagttaagggtccgggcttttgttgggacatctccctgctctgcgttggtgtttggacctgagtccagatggttacttcatctacagggaccctacatggagtacaggaaaggtagagagagaaaggcctcccatgacctctgaaacctggttgatttgcaagcagcatggtccaagggatgggtgagacaaaagaaaagaatcctctgccattttggcttggaaatgcctggatttggataacgagcatgaagaaaatctttgtcttctgtctctctgattcctaaagagctcttgctttctttaaacatacacagtggcaaggactcaatgagaggcttttatggaagatctgggcttgtccacagaggctcctagcagtctgcgagcctggcatcttccaccaggtaatgctctggtgggatatggttcagattctttaagtacctctaaaagccagttacaaccattgtgattcagatggctctgggatggcgagacatttcacatctagagcagctactgattctaattgtcctgagcctgaactttgtttcctcatcagagtcagtggttctccaagcaggttcagggcccattgctgacaggagaggaggtttctcccggcctttggcagatgggcctctgacagtttcaatagtgttttttctgtctctggcatgaattaataatgagcttttattttaacaaaacctaaacatcacctcaatgatgccacgctgcaatcagcccaggactttccatgcagttgctaaggtttatttagaacattgtgcaacaggctatggccataccaccctgaacatgcccgatctcgtcagaacactgtgcaacagtgacgatggcagtcatgatgactttactccactgaaaaacctgaagaccacaattctaagtccatagttaaaaccccaggagatccatctgcctgtttctgctctgctagtcagtaagcctggataagctcccaggccagggtgaagcaggttaacttcccacactgggctccaagtgggtctggcagatttctagaagagatgtgaggacaaaatatggctacatatctagccattggttcacgtgtccctgaatctcacattgaagcttctgggccatgggtttcatcctagccagccctgctgtcactcatttaatgagagtttaccgagcaccttctatgtgccaggctcgattctaagtatcaggggtagagaactcaagtagaccaaatagtccctgccctcagagagcacactttacgttagaggaaaggacataaacaagataaatagataaaatgtgtagaatattagggataaatgctaaagaaaaatatcagcagagaagaaacaggtgaatgtttggctagagcaggcagtggggcatgtaattttagtcagtttggcctcactgagaaagtgacatttgagtaagacctaaaagaggtgaggctacaagcccttggaatttggggcagaagcaagccaggcagagtatacagcacattcaaaggtcctggggtgggaccatgcctggcatttcaaggaacggcatggaggccagcaagactggagcagagagaacaggagggagaacagctggtacagtaactaagagatccattagttcacagccaggactacgaattctactcagaaagacctgaggaaagctcaggagggtttaagtagaggaacacttattttaggactcaggagacctaggccctgatatcttttgctacttaccagctctatgatcaagtaactttaattattctcattctaaaatcactttttctctattgactttctttctttctttcttttctttctttccttccttccttccttccttccttccttccttccttccttccttccttctttctttctttctttctttctttctttctttctttctttctttctttctttctttctttctttctttctttctttctttctttctttctttcgagatgaagtcttgctctgtctccccaggctggagtgcagtggcacgatcttagctcactgcaacctctgcctcctgggttcaagcaattctcttgtctcagtctcccaagtaatgggattacaggcacgtgccaccatgcccagctaatttttgtacttttagtagagacggggtttcgccatgttgcccaggctggtcttgaactcctgacctcaagtgatccacccgccttggcctcccaaagtgctgggattacaggcatgagccactgcaccaggcctctactgactttagtttcatcacctttaacacgaggagtttgtgcttttgaattctaacatttctctagctctaccattctgttattctagccaaacaaatctaaaagtaaatcaaataaatcatttgttagtgtcaaaaggacacatttccacatccttccttgttcagggttcctctggacagggttccagtgggaggccatggggcatcactccccatctcctattttgctcaaagttgcagggacagatcagaggtatgaaactcatctactcctctatgggagtcttaaatcccacccccactcccttttcacacctgtcaacgagatcaagctgattacctaaaacactctagttttataatcattatttcatcctatttaattgagcccctatggcataccctgccttattaaaaagtcagccaaagacagaggggaaggatcagacaggttccccatccttttgcagagttgatgatcttgtcagataacatcttgtttagtctaaaactagaaaaatgtactcataggattcacctaagtaaggttacaaaaattgtaaacagcaggtgcttaatgagatcatgcacagtgtgtgctgcaggggctcagagaatagagtgctttcagtgggcagagggactgaggagacctctgagggaggtagggagagagccaggccttggaagctaggtaggattttaatgggcatatattactgcctccaacttattggcccaataaagcaggcattacatggtgggaaaataaatgtgaagcaggttggcagtgtaatgtgcatatgcacacaggcacaggcagctgctgatttgggttttcctgaaccgatcaaaatcatttttctacagatttcatggcacctcactttaggacacccgagtgaccctgccccatcatggacaggtgggatggggtcttggaggaaacgtcaggtctggagattagcatttcccagagccttgcttggagttctcaagatatctgctgttttgccaaatctgcatcccctgggaacctgtggggagcctgtgaggataacttgtacccaaagagtggtgaaggtggccaaagaaccttccactattgtttgtcatcgaggccccaaacctcggagttggaaggaaactgctctcaggaagaatggaccgctctccttcttgctgctctactgcacaccattctctatcatagcacatgtttaaacaaacatatacttgtttgtttaaaagaacacaccgaactcaaagtttccctttataaggatacagcatcttcctcatctctgtgtcccctactagcagatagcatgtgttcaataaatattgaaagaaataatactcgagctcagttcatcttaacctttttggggtggaatttcaggtcccataaaggatctgaaaaaggctatggaccttctccctagtgaaaaatgcacttattcatatacttacaagattttacagatgatttgtggggcacttcggctacagattgagccctgctttaagggcatagtaagcactctacaaaattcttcacaggcaatcctgcagccttggccccgaccattccagtggtggggagttcactccctctccatgtgcggacagcattcatggttagaggcatcatctttatatattgtatagcaacctccctttctgtaacccatatctatagtccctgttctcttcttaaacagaaaggagctggaaattttccatcacaagggatctaatccatcatgcacaaatgtttatagacacatgtcctgagcctccttgagcttctcttgcctctgctgttttttgctctgatggggtttacgtcttctccctatcctgattttgtgtattcagaacaaaaacgtgggttatcaacacccctactaaagtgtggtacccagagagaagcagaggagatgagcattatttttctctttgttccagacaatgcacttgcctttatgccgcctaagactgcatttgctttttggcagccaccacacaccattggcctataatgggcaaggagtcatataatgctcccaaggcttttttcaggtgtgctgccgataagccctgtctccccactgggcatttgtgcagcttgctgttcagatctaattgcaatacttttacatttatccttgttaagtgccatcctattagatttggtccttgagtccagcctggtgagacatttttggatcctgattttgtcatttaacatattagctcattactcgcagacaatgtgtttaacatgcagcaaagagctaccacttttggagtatttctccaacagacattgggctttacacagaatatttcattgtcctttcactccagctctacaaagaatgtgttataatcctcattttatatttatggaaactgactcagaaactttaggtaacttaggcaaggatacacaaccagtatatggtcgagacaggatttgaacccaactctgactctgaaggtcatgttcatagccaccctactatttttgccttcatccaagtcattcatgttttgatcagtacaggacaggatcagagccttgtggcaaaaacccttgaggacttcaggcggagagggttgattcattcaatatgatttcttctctttgcttggcatgttactttcatgctactcactattatcctaagaagtagaggactgtttgttcactgttttgaagaaacacagttatagtaattccctgccgttccatgagcccccttaccaagtagtaaataatgtgaatgtggcatgacttgtttttcatgaattcatgctggcctctggaagtcccagcttatcttactacatgctctgaagcccttgtttaaagaattgagtctagactcttgcccaagaatattgctgagccttcttatttaacttatttggtagctgggagatggggggcaggggtaggggttggtggtgacaccttatttcaccaggcctctaaacacagcatcaaaggaaagccagagatatcctttttgatattctctcaaccaccgcacatgtcttttccagttaattatagatcaatctgctgtgaatttgcacaaagtattattgaacacattttaaaattctagcaagtgtgacctcaaactatagactttcatttacatatgtgactctcagagccagtgcccaatgacaaccttatacataagccttacaataacagcttaaaaaaaaattacaggagtaaatacatttttactggcttttaatttcaaaaatcctaataaagttttgtagtagtttattttgtggagatacatttgacccaagattactgaggaattcagaaaaaaaaaaaaagaaaaagaggcatgaaaggagaggagagggcacacaccttttgttctgattgttggcttgaaaacaaagacctttgcaggtgagcagctgataaggaggctgcatcttctagaactgtgagatgtgtaaggttcaaggagctattctcttttggggtatttcacttgagcttatcttcaccctatagaatataacttaatataagaacttggggaccatcatagccagggattaggccctctcagtgtgcagttctgttttccccatccatcaatgagacttcgcttcgccatttctctctgctgtgagatcctctgtcttagattatattttatgtaagcatatgtattagatcatgtatgttatgatgttatttaactatatgcgttgttgtgtattctataatattaagtatagattttttacatgcacatacattcttactgtataatttttgttcgtttgtttctttctttctttttgtttgtttttgagacagaatcttacttcatcacccaggctggagtgtagtggtgcgatcttgactcactgcaatctccgcctcctgggttcaagcgattctcatgcctcagcctcccaagtagctggaattcaggcgtacgtcaccacgcccagctaatttttgtatttttggtagagacgagttttctccatgttggcctggctggtctcgaactcctgacctcaagtgatctgcctgccttggcctcccaaattgctgggattacaggcgtgagccactgtgcccagctttactgtgtaatttttacacatcaatccacactcacaatcatcttactattgcatgttttaacagaggtggaattgttacagatcattgtaggtaggaaaatgacggactcatttgaggaaaaagcaagaagctttttcctcaaaaccttcctccactgcaaaacccccttacagggagactaaagacgtacaatcatatggagtctcattctgtatagattcatagaatggaagaaatacaacgacttttgaaataatcaaagccacctcccctcagtgtgctggtgaaaaatctgcagtccagagacacttgccttacatgacagggcttaatgtagagttcatgctgccagacctctgatgtgaagttaggactgaaaatcaaagtttatcagggcgttacatctgtgaaggaaaaaagcaaaggaagcacgactgggctgggaagctgtcaaacagggatacagacataagggagccccagaacaaaaattacattattttatttattttattttatttttgagagacagggtctcactctgttgcccaggctagagtgcagtggcatgatcatagttcactgcaaccttgacctcttgggctcaagagatcctcacacttcagcctcccttgtagctgggactacaggcgtgtgccaccatgcccagctaatttttgtattttttgtagagacagggtctcagttgcctaggctagtctcgaactcctgggctcaagtgatccctctgcctcggcttcccaaagtactggaattactggggcaagccaccatgcctgggccaaaaatcaccctttagatgagtcccaccttgggcaaaaatggccaaacccttgagccaccggcaggctcagtcactgcttgaggtggaccttaagagagctagcaggcaggagctggcagccaaccacactcctctgagctgggcaaccagccctttcttaaagggatatgtgaagggcacatttgcatgattttcatgtctgtcacagaactggaatgtaatcttgtattggttctatataaaagttctagagagatattattttagtgactttataataaaagtaatgcttatttgtattcattgtgaagcaaaaaagtattgtctcaatagatgcgttgcaaatgccaaaaaagaaatgtatacctatatatatttggtgtatgtgtatatatatatatatatacacacatacaccaaatggttttttattaaaatattttatggcaggcatttggaaatggcctaaggtgtctccagagtggaggtcagtgaactcagaacaaacccttgaatattccattagtgagtagttagatgaggtaataaataaattattattaagcactttgcaaatagagtgttatgtaaatgctaaataatcataataatatagtagtatgctgatcttgataaacaggttggcttctatatcatttaaaatggatggcgcagcagcgtctgtgaagatgaatgaggttcgcattcacaaagctcagtaacagcacagtctcctctgctaggaggccgggcctcctggctcggagttgctgcgttctcttcccctcatttctcggtgggacaattagcagaggagagggattctggccagcttgaagagggtagtaaaaaggctcccatgcagggatattgaaaggagacttaggtgagtgcgcagggatccgcgtttctgagaactcagggctaatctataagtgggggcggggcggggcagggaattaacatttattgagcgcctcctgtgacccagacactgtgctcggtgctctgtgtttattatctcatttatcctccaggccagcacattaaggtaatagaagagtggaataaagccgaatgcattactaatttctgtggaaaagcagaaggcctgaccctagctgttttcttctttgcattctggagtgagatctagaagaaggggagagtcctccagggaatgagagaaagcctgacccagtgatttatcacagcccccaaatgctgggaccttttaggacacagttgtatgatgaaaagaggcacatcctcctttagggctacacccaataactgctcctcccggccccctgccgtgcacctaactcaccctggacctcacagccccgcagagcctcgttcagccctttctttcaccttaacaacatctagcaaacagtgatagaggaagtaccatgtgccaaatactccactaatggctttatgtacattatctcatttaattctgtgacaaccctgtgaagtaagtttttttttttgcctgtaagtttctcattttagatggaaacactgaattttgtcaagtaacttgccaaaagtcacacaactggttcaagggggaggtgagagagccaggttggtccattcagatcaaaatcctccttatacctgaggattatagcccagtgatgggcaaaaaaaaaaaacccaaaccaaacaagcaaaatccaaatcctcctgatacttgatatgttattcctaataatgattaaaccctttgtttaatgtgccagattttgagggtataaaagtagctcaaggctgggcacagtggctcacgcctgtaatcccagcactttgggaggcagaggcggaccgatcacttgaggtcaggaattcaagacttgcctggccaacatggtgaaaccgcctgtctcctaaaaatataaaaattagccaggcatggtggtgcatgcctgtaatcccagctactcaggaggctgaggcaggagaatcacttgaacccagtagacagaggttgcagtgagctgagatcgcgccactgcactccaacttgggcattggaatgagaccttgtctcaaaaaaaaaaaagtagttcaagtgtttattcattattaaacatattatgctcaacttcattgaacataatgacatataataaactgtacatttgaagtgtacaatttggtaagttttgacatacatatacacaagtgatacacaagtgatcaccacaaccaagataatgaacatattcatcacatccaaaagtttgcttctttgtaatccattcttcctacctcttcttgcctcatcttctccccagccaaccactgatgggttttctctcactaaagttagcttgcattttcttgagttttatataagtggaatcctgcactatatactctttcttgtctggcttctttcactcaacctaattattttgagattcatccaatgttgtattttgtctttgttttatttagagacataaacacttagagtgcttagtatgtattttatttaattttagctttggactcagtttagagttcgaattccagttctgtcatttgttatctgtgtgccaaatggcaagtttcttaatctgtctgaggctgtttttttcctccataattaaaactacattatagggttactgtgaggattagatgagataatataggtaaactgcatagcacagcctctattcatggtaagcatttgattttgcaattaaaataaatttttaaaaaataaaaataaattgtgcaccaaaattcctttgatgtctcctagatcctcaatatcaggttaataaaacaatagcctgcctatgttgtgccaagtagaatacttaatgtggcatatgaattagcttttttaatatttgcaagaagactgtgaagtatgcagtcacattataatcccttattacagatgatgaaactgagatggagaggtagtagaatcaggaattgaactgaggcagtctggctcaaggctgtcatttccattatgatctggctacatttcaatatgcaatgacatcacccactagccctagggttttaggggaattgctataggaaaaaaaaaaatctaaatatgaagaccatgtcagtagctaagtaaaagttagagaaatgggtaaaaaaacaaaattattattggaacaccaattatgattaaggaataccaattattttaaatgtgttataggaatatgtaggaaatttgaacttataaaatgtaatgcacacctgattttagggttaactatgagacagtcaaagacaaggaatctttgaagaagaaattatggcagccggagcataatctgcctttctggaagcataggagaaacttaagtgttctttgtatgagcctcaggttttagagcagacccaaaaggtaagcccaccactgaggctgcacagtctcagctaagcaaagtgtactcatcccaaatctggggattagctgtcaattaagagcccattggaatagctgttacaacagaatggaaaaattcaactatacctttggttttcttaagtatagtaattggtattcactaaagatttgaaatttagtggaacagagggagaaaaattttaattcagttcaggtgaacaaacatttatttgcctgattggcacagaattcacctttgagaaacacctatttggagttgggggctagggaatgaaagatataaataaaacaatttcagtggtgagaaaggcctggatttgaaagatatttagaaggcaaaatcagtggactcagtggctacctgcaagtaggcatgaagggaaggttggggttctggccttggtaaatgtgagcaaccgctaaaacagaggattctgtaaacataggtgaggagggcaatttctgtcatcttgggtttgacatgtaacagaagatctaagtggaaacctccaacaggcagttgtgtttgaagataactgagcccaggaatgaggtcagaggtgaagatcagcatataggacacagctcaactcatgcactggatgggatcaccaagggagcatggatggagtaagtcaacacggtagtcatgatggttaaatgtgtttggcccaataccaatataccaaggcatactaaagtaatgggagtggataatatgaccagatagatctttcctattccaaactttttcaaatctacttattttaacaatacatcatttattccatgtgaatacatgcaaattctaatccgtattccattgaaatgcagtacttaagggggaaaagaaccctaaaaaaacacaaaagcctacgctgggggtgctcctttaccttagttgggcagtggctctggaagtacctgggctggggaatgagggcagaggtgccagtggtatagaagagctattttgatgtattgaaatctgaataaaccgttgtgcctctctggcagttttcccttctgtcaaggatggagagggttaagacatttacctgaaaagaaggcttatgtttttcaatgtttctttaattatgtgttgacttccctgcaccttaaactatacctacacatctcctcatacccctattcctgtattattccgtcaacaagcacatgttgggcaccttctgtgtggagacctcatatttgatgctagggacacagagaggatggtgtttagttcctgcccttgataaacagaaaatatgctcatgatgataggctaattatcaaagcgttcttcattgccacagttttctgtgtgtcaatgcactctcatctacattatatcgtgctacagcatgtctgcaaaggaagtatttcttcacagtgattattatgatgcatctggtagctgagacaccaaggtgtggggacttgggaaggtcagtcaatggctgagatccagatcttttggccaagcgttctttctgctaaggggaatgctttttcccagcactcccatcctgggcaccttgcctttgcaatttcttggttgtatattttatctctttcagttgacaaagttgacaggcccttgggaaatactgactcaagactacttgcctttggtcaagtgctaaatcccacaggtgtaggattgactttggaagagccactgtcactcttgctgccccctcccaagccctctagtgtgtctagagggaagtaggattatcagttctgtacataccagagagcactagcaaaaccaaattagctcaagctggctgccattcaggtcagctaattaaattagctattgttgcattactgataaggacagtttggaaaaggaaaaaagccactcattccagcagccataaggcgaaggccaagaaaatgtgttaatgggaacactctgaaagaaaacccctctgactaggagcgggacctagtggtccttggtggtctgatctcctagccatctgctccaagctcatgctcccagtgctctctggctctggtctttatgaacattgctacactctggctttctggtacccaactgcagccaagacagccctcccctttttctcccaccatgagcctaatcctcccgggagtctggagagaagtggggatttttctgggggagaacagctcacccttgagtgctaaaatgtaaaccccccatagtataaaagccagttgatacttggaagagtcttgaagaagaactgcagagacacagagagaaaggaaggaaagagggaaggaaggaaggaaggaaggaggaaaagaaggaaggaaggaaggaaggaaggaaggaggaaaagaaggaaggaaggaaggaaggaaggaaggaggaaaagaaggtaggaaggaagggagggaggaaggaagggaggaaggaaaggaaaaatagaaaagaggagagaacaccttgcccttgtgtactctccccatcgtataaatgccagttgatatttgtaagagtactaaagaagaaccagagagagtagcggtggtgagagagagagagagaggaaggaagggaggaaggaaaggaaaggaaaggaaaggaaaggaagaagaaaaaaggggaggaaaagtggggaaaaagaggaaggaaggagagagctaggaagttccaaagacactacattttctggctgtccagcatctgctcattggctactgtgtgctgtcttggtgaggctgtaagttacattggctgctatcttctagttgagatttggtcacatggacttaccctaggccaactagccaaagtcctaagatctggaacttgagatgcaaggacaaagaatcttagaagctcattcactttagcagcagctcactccaatgagacttgcacctacactacctttctaccatcaggtcccacccgctatgcccctcaccaagctgtcctggtttcatctttttcccaaaactaattatccaggtaaaattctctgtgctccctgatatccttctgatttactctttttctgcctaaaataacctgagtcagtttcatgcaatccaaatgatttaaacaatctttagtccaacccttttttttttttggtagttgaggtaggagacccagagatattaagtgattttctcaaaatcacacagatgatcattggcagctccagggctggagcctaggcctctaactctatgctgcctaaatatggtgctcactaaatatgcatcttctgagaaagtgaaggcaactcagggaaatgtgcctgagagtccatgggagagcctgggaaattctcatctgtgctcctcattttcatggcttcattttttcttgatttcttagattctgtttaagattcttaagccatgggataatattctcctgtgagaaaacaagtgaaattaaaattgtccatacgtaagttcatacatatacagtgtgtgtccctctttcactatcaaatgtgaaaagtctatagtccaaatttattcttaggccctcagtaccaagggctagagtactttctactgaactaacgcatatttttttactttaatattctatattctttttaaaaaataaaatagagatggagtctcactatgttgattaggctggcctccaactcctggcctcaagtgatcctctcattttgacctctcaaaatactgggattacaggcatgagctaccatgcccagcctctgatgtaattataatcaaggacatcagtaacatcaaggagaggaacaggtgtacttattttataggggtatctgtaattataattgggaaaatatgatacatgctatgctatgctatgctatgctatatacttagtttaaatttggaactatattttctcagcctcagtttcttcatctgcagacaagaacgttaactgttttctcttcctcaagctctagcattctaaactaaatgaggaattataaaagctaccgaactaaaggagaaattacaaaggttagtgaattaggcatattactgaaataattggtttaaaaatctttcaagctctttaggtgaaaataaaagggaaaatcttgctagagaatctattctaaaagactttagttaaaaacatcaagccccacttcaatgttcattctgaggaggactagagaaagttgaggccatcagtgttcaggtacagagtactaattccacaagacccaattctatgtaccaacatgagacgatgttattagcgcctctcacccataaaaaaaatctgtcttcagctattgtcaactcaatcaattgtcattttgggaatttggtggaaagggattgcctagccctgggcaaatggatattttcaaagcatccactaaaataattataattattgctttatatcttccttacacaaaataatataaagtcattgcaaaatatgtgaaaacagaaaaaatatctttataattctatcaccctaacacaatagtcctcattttccataatttccttctaatatttgctcacatatatgtatacaattactattttggaaatttattgatagattttttttaagtttgtcaagctgaattttgccaaatttgagttcagaaattagaagcactagctgttttttcaactttgttatacattctctttctctcttctttatccctggccataaaatgggagcaccggcaccttccccttctgtaatgaataggagtaatgcttcatgtctttgagctcttctcagctactcagaaacaagtacaaattaatcttagatgcactattaacttttgaaaaacatttttctctgacaatgtttttatattaaggctgggttctatgtacaatttgctacaaaaaagaggacaggtgtctaacactccctctgaactgtcattgacctatgatagggccagtacagaatgttcttcattagcttctttttaggtggaggtagataaacaaggggaaggggaaaaccattggtcaaattacgagcatgcagatttaagtcctgggtttgcaactaaccagctgtgtaaccttgagcaagtcatttaatattactaggatcagttgcttcatctgtaaaacacgggtaataataactatttcgtagagttgctatgaagattaaacaagctaatgtaggagaaagtactgcaaaaatgaatcacatttttttcttaaaaagaaattataaacaggtgactccattgaactattcctaatatttatcatggagatttttttccatattatatgaatgaaaagtggcttcaatttttggtggctgatgagccatttcctgaatcatctaggtccaggcctttttcttcttctcctattttcagctggttagctgctcattgagatcttgccagagggtgggcgaaagaaataaaaactgaaatcggtcaatttgactctttgatagcagtcatgatgaaagatctgtggatagggggtgttaaagttgtgagttaaactggaatttttccttcttaccaggaaattgcaagaacctattgatggcttggatgctctggtggtgacagcaagtcctcttctcttgactgaagaaatgtcttcccctatctgaaaagtggcctctcttccggaatgacacatactgacttttgaagaagcaaaaggatacctgctggccagtcatatcagccaaaaaactctggtgagcagtgagttggcagatgttgcaactggaagactgtggcatcaacagagccccaaagcaataatctctctttctcttcgcccccactaatccagcaatcaaataatcacttttaagcatttactgtgcaccaccatataacataaaatgtgatgaatagctaggtatatatatgacaacctctaaattctcaaaatattataataaattaagaaagcaagagttgtgcatgtaaaaagacaattaactacatagggagaaggcagtgaacacatttagtgcatctcccctgtaccggtcactgtgtgaggtgctgtacaagtactaatttatctaatccccaccaaatccctggcaggcatttctatccttgttctgtggatgatgtgggagttagagatatttaataacttgcccaagatcacatagctacaaaagtgtggggcctgttttcaggtttagatgtatctaactctgtaatctgtgctccataactatcccacacctaccaacgagagaaatcagagctcaaagacatcatttagtatggctggggaatgacaagactttaaaatgcctattggcaaaacacattgataaagttataccaagtccattaacttctctgggaaatatttctagctagaggaaaaatgcctggattctggaagcagggatggtggagtggaaatgacagcacaccagtctcagctcagccattatccacacgtgttcatcccagcaagttgcttcatgcttctaggctttgtgtcatcatccatagtatagagtgtttctagattgcctaatgtcactcacactacgtcgctgggcaggtgtgtggtacactagctctaacatcaagcagacctgagtttgaatcctggctccgtcttcaagcaatgggctcttgggcaagtaattttcccatctgtaaaaatggagatgataatacctacctcagggtctttgcccttattgttcattctcctggggacagtctttcccagatatccgcaaaggtcactcttttacctccttcaggtcttcactcaacttacctttttgtgagaactttcttgaacacaatagctaaacttgtaaaccatctggcatttcctatcctctttcctcattttattattttccttagcactcaatacctaacatactatatagcactcaattatcttatttattgcctctttcccacctctagaatgtatgctctataagggcaggattttttgtattctttactgctgtatccccagtttctagaatgatttaggtgattaataaatatttcttgcataaatgaattttttgtgagtgtagtgtgagtaatgtcctttgcacaagacccggtacacagtaaacactccagacatgttctctctttatgttaccattttatcgcaactttccctcatctcagtggggcacatgtgttctctttcttctccagataacccaagattaacccaggattagtactttaacccagctaatgaatgtgaaggcttgattctgtgaagattagtctagaagcaagtggagttaatcattgtgagggaagtaagaggggatttgtgtggttgctaccttcaaatacctaaaggtgtgtcacatagatagcaattccaggaagaatacttctgctgcacaagaaaggatttcaacataattggatgtgtaatgatagaataatctgtctcaggagatatcaggttgctcatttctagaggtctcccagaagctaggtaactaaatctcgttgactctgaggataattattgtaatgagtgacaaggttggagtgcaactaaggagatcac
